(19) United States
(12) Patent Application Publication
(10) Pub. No.: US 2018/0321242 A1
(43) Pub. Date: Nov. 8, 2018

(54) VIRAL BIOMARKERS AND USES THEREFOR

(71) Applicant: ImmuneXpress Pty Ltd, Boonah (AU)

(72) Inventors: Richard Bruce BRANDON, Boonah (AU); Dayle Lorand SAMPSON, Seattle, WA (US)

(21) Appl. No.: 15/773,944

(22) PCT Filed: Nov. 4, 2016
(86) PCT No.: PCT/AU2016/051052

§ 371 Date: May 4, 2018

(30) Foreign Application Priority Data
Nov. 6, 2015 (AU) 2015904558

(51) Int. Cl. G01N 33/569; C12Q 1/6888; G01N 33/68

(52) U.S. Cl. CPC G01N 33/56994; C12Q 1/6888; G01N 33/6893; G01N 2800/7095; C12Q 2600/166; C12Q 2600/158; C12Q 2600/178; C12Q 2600/16

(57) ABSTRACT

Disclosed are compositions, methods and apparatus for diagnosing and/or monitoring a herpesvirus-associated systemic inflammation by measurement of a host immune response. These compositions, methods and apparatus can be used for diagnosis including early diagnosis, monitoring, making treatment decisions, or management of subjects suspected of having systemic inflammation associated with a herpesvirus infection. More particularly, the present invention discloses peripheral blood RNA and protein biomarkers that are useful for specifically distinguishing between the host systemic immune response to herpesviruses as compared to the host immune response to other causes of systemic inflammation, including other types of viruses.

### FIELD OF THE INVENTION

[0001] This application claims priority to Australian Provisional Application No. 2015904558 entitled “Viral biomarkers and uses therefor” filed 6 Nov. 2015, the contents of which are incorporated herein by reference in their entirety.

[0002] This invention relates generally to compositions, methods and apparatus for diagnosing and/or monitoring a herpesvirus-associated systemic inflammation by measurement of a host immune response. The invention can be used for diagnosis including early diagnosis, monitoring, making treatment decisions, or management of subjects suspected of having systemic inflammation associated with a herpesvirus infection. More particularly, the present invention relates to peripheral blood RNA and protein biomarkers that are useful for specifically distinguishing between the host systemic immune response to herpesviruses as compared to the host immune response to other causes of systemic inflammation, including other types of viruses.

### BACKGROUND OF THE INVENTION

[0003] Fever and clinical signs of systemic inflammation (or SIRS) are commonly seen in patients presenting to medical services; either in general practice clinics, outpatient clinics, emergency rooms, hospital wards or intensive care units (Rangel-Frausto et al. (1995). The natural history of the systemic inflammatory response syndrome (SIRS). A prospective study. JAMA: The Journal of the American Medical Association, 273(2), 117-123; McGowan et al. (1987). Fever in hospitalized patients. With special reference to the medical service. The American Journal of Medicine, 82(3 Spec No), 580-586; Bor et al. (1988). Fever in hospitalized medical patients: characteristics and significance. Journal of General Internal Medicine, 3(2), 119-125; Finkelstein et al. (2000). Fever in pediatric primary care: occurrence, management, and outcomes. Pediatrics, 105(1 Pt 3), 260-266).

[0004] When SIRS is the result of a confirmed infectious process it is called infection-positive SIRS (ipSIRS), otherwise known as sepsis. Within this definition lies the following assumptions; the infectious process could be local or generalized; the infection could be bacterial, fungal/yeast, viral or parasitic; the infectious process could be in an otherwise sterile body compartment. Such a definition has been updated in Levy et al. 2003 (“2001 SCCM/ESICM/ACCP/ATS/SIS International Sepsis Definitions Conference,” Critical Care Medicine 31, no. 4: 1250-1256) to accommodate clinical and research use of the definition. The revised definition allows that the infection be in a sterile or non-sterile site (e.g., overgrowth of a pathogen/commensal in the intestine) and that the infection can be either confirmed or suspected.

[0005] In many instances the use of the terms SIRS and sepsis, and what clinical conditions they do or do not include, are confusing in clinical situations. Such confusion leads to difficulties in clinical diagnosis and in making decisions on subsequent patient treatment and management. Difficulties in clinical diagnosis are based on the following questions: 1) what constitutes a “suspected” infection given that many body organs/sites are naturally colonized by microbes (e.g., Escherichia coli in the intestines, Staphylococcus epidermidis in skin), viruses (e.g., latent viruses such as herpes) or parasites (e.g., Toxoplasma, Giardia); 2) what constitutes a pathological growth of an organism in a normally non-sterile body site?; 3) what contributions to SIRS are made by a viral/microbial/parasitic co-infection in a non-sterile body site (e.g., upper respiratory tract), and if such an infection is suspected then should the patient be put on antibiotics, anti-fungal, anti-viral or anti-parasitic compounds?

[0006] Patients with fever and SIRS need to be carefully assessed, and tested, to determine the cause of the presenting clinical signs as there are many possible differential diagnoses (Munro, N. (2014). Fever in acute and critical care: a diagnostic approach. AACN Adv Crit Care 25: 237-248). Possible differential diagnoses include infection (bacterial, fungal, viral, parasitic), trauma, allergy, drug reaction, autoimmunity, surgery, neutropenia, cancer, metabolic disorders, clotting disorders. Patients with fever and SIRS caused by bacterial or fungal infection often require immediate medical attention and it is therefore important to quickly differentiate such patients. Patients with fever and SIRS caused by viral infection need to be further assessed to determine 1) the degree of systemic inflammation due to viral infection, 2) the degree of involvement of microbes (commensals, microbiome, pathogens) to systemic inflammation 3) contributions that each of viruses, microbes and sterile injury are making to systemic inflammation 4) likelihood of the patient rapidly deteriorating. The results of such an assessment aids clinicians in making appropriate management and treatment decisions.

[0007] Herpesviruses are a phylogenetically ancient family of large DNA viruses for which there is a wealth of scientific literature because they cause widespread disease in both humans and animals. The spread of herpesviruses from one generation to the next would appear to have occurred successfully for tens to hundreds of millions of years and the three sub-families of herpesviridae arose 180-220 million years ago (McGeoch D J., Cook S., Dolan A., Jamieson F E., Telford E A. Molecular phylogeny and evolutionary timescale for the family of mammalian herpesviruses. 1995. Journal of Molecular Biology. 247: 443). This co-existence of virus with host involves a close accommodation with the host immune system (Hill, A B. Mechanisms of interference with the MHC class I-restricted pathway of antigen presentation by herpesviruses. Immunology and Cell Biology. 1996. 74: 523-526).

[0008] There are more than 80 known types of herpesvirus, but only eight are known to cause disease in humans. These are divided into three sub-families listed below:

[0009] Alphaherpesvirinae: human herpesvirus 1, 2 and 3 (HHV-1, -2, -3);

[0010] Betaherpesvirinae: human herpesvirus 5, 6 and 7 (HHV-5, -6, -7); and

[0011] Gammaherpesvirinae: human herpesvirus 4 and 8 (HHV-4, -8).

[0012] Of these, the most important herpesviruses with respect to human disease are: Herpes simplex virus (HSV1 and 2, or HHV1 and 2), Varicella-Zoster virus (VZV, or HHV3), Epstein-Barr virus (EBV, or HHV4) and cytomegalovirus (CMV, or HHV5).

[0013] Key features of all herpesvirus infections and diagnosis include:
[0014] Most people are exposed to, and become infected with, at least one herpesvirus type early in life;
[0015] An infection with a herpesvirus is permanent for which there is no known cure;
[0016] Following an initial infection, to which the host immune system responds and recovers, herpesviruses become latent (that is, exist in a dormant form in particular cells);
[0017] Latent herpesvirus infections can become active herpesvirus infections (active meaning the immune system is actively and demonstrably responding to the presence of a herpesvirus) when the immune system of the host is compromised; and
[0018] Diagnosis of a herpesvirus infection is often based on the presence of pathognomonic clinical signs by which time the efficacy of treatment with anti-viral compounds is diminished.

[0019] Confirmatory diagnosis of a herpesvirus infection is usually achieved by measurement of an IgM/IgG serum ratio, comparison of IgG serum concentrations from two sampling time points, or determination of IgG avidity (poor avidity correlates to an early infection), and/or the detection of herpes-virus specific DNA or mRNA transcripts. Differentiating latent herpesvirus infection from active herpesvirus infection is more challenging and methods to achieve this include; detection of “late” virus-specific mRNA transcripts, and comparison of the levels of virus antigens able to be detected in whole blood versus plasma. In the latter instance, latent infection will result in restriction of antigen to whole blood rather than plasma (Ross S A, Novak Z, Pati S, Boppana S B. Diagnosis of Cytomegalovirus Infections. Infectious disorders drug targets. 2011; 11(5):466-474).

[0020] Oral anti-viral medications such as acyclovir, famciclovir, or valacyclovir, which are effective and specific inhibitors of herpes viral DNA polymerase, have been developed to ameliorate the symptoms of herpes infections. These medications can also be used to treat an outbreak, or for suppressing herpesvirus recurrences. Lower doses may be helpful in reducing the number of herpesvirus attacks in people with frequent recurrences. Such medications are most effective early in the course of an infection and before peak clinical signs occur.

[0021] Physiological stress (such as heavy exercise, concurrent disease, mental stress), or where the immune system is compromised (for example HIV infection, immunosuppressive therapy (anti-organ-rejection therapy, steroids, anti-cancer therapy etc.), sepsis, other viral infections, pregnancy, can lead to susceptibility to primary infection or reactivation of herpesviruses leading to chronic symptoms of infection, or crossing of the placenta by herpesviruses to infect the fetus (Bustamante, C. I., & Wade, J. C. (1991) Herpes simplex virus infection in the immunocompromised cancer patient. Journal of Clinical Oncology: Official Journal of the American Society of Clinical Oncology, 9(10), 1903-1915; Walton, A. H., Muenzer, J. T., Rasche, D., Boomer, J. S., Sato, B., Brownstein, B. H., et al. (2014). Reactivation of multiple viruses in patients with sepsis. PLoS ONE, 9(2), e98819; Blyth, W. A., Harbour, D. A., & Hill, T. J. (1980). Effect of immunosuppression on recurrent herpes simplex in mice. Infection and Immunity, 29(3), 902-907; Muller, W., Jones, C., & Koelle, D. (2010). Immunobiology of Herpes Simplex Virus and Cytomegalovirus Infections of the Fetus and Newborn. Current Immunology Reviews, 6(1), 38-55).

[0022] With respect to the host immune response to herpesvirus infection, it is known that an innate immune response is elicited followed by an adaptive immune response. The innate immune response is antigen-independent and consists primarily of cytokine production, complement activation, macrophage and natural killer cell activation and apoptotic cell death. A critical element in both the innate and adaptive immune response to viral infection is the production of interferons (IFNs) by a variety of cell types and in response to a variety of viral antigens (Mossman K L. Activation and inhibition of virus and interferon: The herpesvirus story. 2002. Viral Immunology. 15(1): 3-15.; Lebel F and Hirsch M S. 1985. The role of interferon in immunity and prophylaxis. Pp 371-393, in Roizman, B., and Lopez, C. (eds.), The Herpesviruses, vol 4, Plenum Press, New York.). The main inducing element of IFNs is double-stranded RNA (dsRNA) which is also produced by DNA viruses. However, viral glycoproteins have also been demonstrated to induce specialised leukocytes (interferon producing cells, IPC) to produce IFNs. The IFNs themselves are not antiviral but they induce numerous interferon-stimulated genes (ISGs) that effectively limit virus replication and spread. Such genes, amongst hundreds, include the Janus kinase and Stat families of signal transducers and activators of transcription (de Veer M J., Holko M., Frevel M., Walker E., Der S., Paranjape J M., Silverman R H., Williams B R G. Functional classification of interferon-stimulated genes identified using microarrays. 22001. Journal of Leukocyte Biology. 69: 912-920). However, such a host interferon response is not specific to viruses since it is known that other pathogens, including parasites and bacteria, can elicit a similar response (Herrera, V., Perry, S., Parsonnet, J., & Banaei, N. (2011). Clinical Application and Limitations of Interferon-Release Assays for the Diagnosis of Latent Tuberculosis Infection. Clinical Infectious Diseases: An Official Publication of the Infectious Diseases Society of America, 52(8), 1031-1037; Yarovinsky, F. (2014). Innate immunity to Toxoplasma gondii infection. Nature Reviews Immunology, 14(2), 109-121).

[0023] The analysis of gene expression products for diagnostic purposes requires identification of one or more genes that can be used to generate a signature for use in distinguishing between different conditions. However, such identification can require the analysis of many gene expression products, which can be mathematically complex, computationally expensive and hence difficult to implement. Much of the biomarker discovery process is devoted to identifying a subset of the data that may have relevant import, from which a signature is derived using a combination of these values to produce a model for diagnostic or prognostic use.

[0024] Measurement of specific host immune responses to herpesviruses using gene expression is known (Hu, X., Yu, J., Crosby, S. D., & Storch, G. A. (2013). Gene expression profiles in febrile children with defined viral and bacterial infection. Proceedings of the National Academy of Sciences, 110(31), 12792-12797; Halminen, M., Ilonen, J., Julkunen, I., Ruuskanen, O., Simell, O., & Makela, M. J. (1997). Expression of MxA protein in blood lymphocytes discriminates between viral and bacterial infections in febrile children. Pediatric Research, 41(5), 647-650; PCT/AU2005/001222). However, conventional combinations of biomarkers use a relatively large number of biomarkers, which in turn makes tests expensive to perform, limiting their use in practice.

[0025] A need, therefore, exists for better ways of detecting the presence of herpesvirus infections, particularly systemic inflammation associated with herpesvirus infections, to permit early diagnosis, monitoring, making treatment decisions, or management of subjects having, or suspected of having, a systemic inflammation.

### SUMMARY OF THE INVENTION

[0026] The present invention arises from the determination that certain host response peripheral blood RNA transcripts (RNA markers) are commonly, specifically and differentially expressed across different herpesvirus infections in the presence of systemic inflammation. Such RNA transcripts (biomarkers) are useful for diagnosis early in the infective process and over the course of infection. These biomarkers are useful therefore in early diagnosis, diagnosis, monitoring, prognosis and determination of severity of a systemic inflammatory response associated with a herpesvirus infection. In particular, based on the demonstrated specificity to herpesvirus-associated systemic inflammation, such biomarkers are useful in determining the etiology of a systemic inflammatory response when caused by a herpesvirus infection.

[0027] Based on this determination, the present inventors have developed various methods, apparatus, compositions, and kits, which take advantage of differentially expressed biomarkers, including ratios thereof (derived biomarkers), to determine the presence, absence or degree of herpesvirus-associated systemic inflammatory response syndrome (HVaSIRS) in subjects presenting with fever or clinical signs of systemic inflammation. In certain embodiments, these methods, apparatus, compositions, and kits represent a significant advance over prior art processes and products, which have not been able to: 1) distinguish HVaSIRS from other etiologies of systemic inflammation, including other viruses, bacteria, trauma, autoimmune disease; and/or 2) determine the contribution of a herpesvirus infection (if any) to the presenting clinical signs and pathology.

[0028] Accordingly, in one aspect, the present invention provides methods for determining an indicator used in assessing a likelihood of a subject having a presence, absence or degree of HVaSIRS. These methods generally comprise, consist or consist essentially of: (1) determining biomarker values that are measured or derived for at least two (e.g., 2, 3, 4, 5, 6, 7, 8, 9, 10, or more) corresponding HVaSIRS biomarkers in a sample taken from the subject and that are at least partially indicative of respective levels of the HVaSIRS biomarkers in the sample; and (2) determining the indicator using the biomarker values. Suitably, the subject has at least one clinical sign of SIRS. The at least two HVaSIRS biomarkers are suitably not biomarkers of at least one other SIRS condition (e.g., 1, 2, 3, 4 or 5 other SIRS conditions) selected from the group consisting of: bacterium associated SIRS (BaSIRS), autoimmune disease associated SIRS (ADaSIRS), cancer associated SIRS (CaSIRS), trauma associated SIRS and a virus-associated SIRS other than HVaSIRS (also referred to herein as a non-HVaSIRS virus associated SIRS) (nHVVaSIRS). The sample is suitably a biological sample, representative examples of which include blood samples including peripheral blood samples, and leukocyte samples.

[0029] In specific embodiments, the at least two HVaSIRS biomarkers are expression products of genes selected from the group consisting of: ACAT1, ACSL1, ADCY3, ADCY7, ADRB2, ADSL, AKAP11, ALDOC, ARHGEF18, ARNTL, ARSB, ATP2B4, BACH2, BCL11A, BNIP3, BTG1, BTG3, C1QB, C6orf48, CAMK1D, CASP4, CASZ1, CCL5, CCR7, CD300A, CD37, CD79A, CD79B, CD8A, CD93, CHST12, COL17A1, COX411, CRY2, CST7, CYB561, CYLD, DGKA, DHRS3, DNPEP, DPEP2, EEF1G, EHD1, EIF2AK2, EIF2S3, EIF4B, EPHX2, ETS1, FAM129A, FDFT1, FLNB, FLT3LG, GALNT10, GDPD5, GFI1, GNG7, GPR162, GPR56, GRWD1, GZMA, HERC5, HERC6, HIC2, HSD17B8, ICAM2, IFI16, IFI44, IFITM1, IKBKG, IL4R, ITM2C, ITPKB, KIF13B, KPNB1, LAMA5, LBH, LDLR, LDLRAP1, LEF1, LRMP, LSM7, LTBP3, MAL, MED25, MLLT11, MRPS18B, MZF1, NAALADL1, NACA, NAP1L1, NECAP2, NET1, NGFRAP1, NKG7, NOSIP, OASL, PABPC4, PARP3, PEX11B, PFKL, PFKP, PHB2, PIK3IP1, PLEKHB1, POP5, PPP2R2B, PRDM1, PRKD2, PTOV1, PXN, RAB3GAP1, RABGAP1L, RALA, RARRES3, RBM17, RBM4B, REC8, RPAIN, RPL1OA, RPL11, RPL12, RPL15, RPL22, RPL27, RPL30, RPL36, RPL38, RPL8, RPS11, RPS5, RPS9, RUNX3, SAC3D1, SATB1, SERBP1, SERPINE2, SERTAD2, SLAMF7, SLC5A6, SPINT2, SQRDL, SREBF1, SRM, SVIL, SYNE2, SYPL1, SYT11, TANK, TAP1, TBC1D4, TBK1, TCF4, TCL1A, TDRD7, TGFBR3, TMC6, TMEM134, TMEM39B, TMUB2, TOP2B, TPK1, TPST2, TRAF3IP3, TXN, UBE2D2, UBE2L6, UBR2, VASH1, VPREB3, VPS35, WDR61, XPC, ZBP1 and ZW10. Non-limiting examples of nucleotide sequences for these HVaSIRS biomarkers are listed in SEQ ID NOs: 1-174 (see, Table 11). Non-limiting examples of amino acid sequences for these HVaSIRS biomarkers are listed in SEQ ID NOs: 175-348 (see, Table 12). In illustrative examples, an individual HVaSIRS biomarker is selected from the group consisting of: (a) a polynucleotide expression product comprising a nucleotide sequence that shares at least 70% (or at least 71% to at least 99% and all integer percentages in between) sequence identity with the sequence set forth in any one of SEQ ID NO: 1-174, or a complement thereof; (b) a polynucleotide expression product comprising a nucleotide sequence that encodes a polypeptide comprising the amino acid sequence set forth in any one of SEQ ID NO: 175-348; (c) a polynucleotide expression product comprising a nucleotide sequence that encodes a polypeptide that shares at least 70% (or at least 71% to at least 99% and all integer percentages in between) sequence similarity or identity with at least a portion of the sequence set forth in SEQ ID NO: 175-348; (d) a polynucleotide expression product comprising a nucleotide sequence that hybridizes to the sequence of (a), (b), (c) or a complement thereof, under medium or high stringency conditions; (e) a polypeptide expression product comprising the amino acid sequence set forth in any one of SEQ ID NO: 175-348; and (f) a polypeptide expression product comprising an amino acid sequence that shares at least 70% (or at least 71% to at least 99% and all integer percentages in between) sequence similarity or identity with the sequence set forth in any one of SEQ ID NO: 174-348.

[0030] The HVaSIRS biomarkers of the present invention have strong diagnostic performance when combined with one or more other HVaSIRS biomarkers. In some embodiments, pairs of biomarkers are used to determine the indicator. In illustrative examples of this type, one biomarker of a biomarker pair is selected from Group A HVaSIRS biomarkers and the other is selected from Group B HVaSIRS biomarkers, wherein an individual Group A HVaSIRS biomarker is an expression product of a gene selected from the group consisting of: GZMA, TGFBR3, CD8A, PABPC4, CHST12, NKG7, SYT11, RARRES3, RPL12, KIF13B, ICAM2, ADRB2, MRPS18B, RPL8, RPS11, SLAMF7, PRKD2, FDFT1, ATP2B4, RPL38, BTG1, DNPEP, NAP1L1, RABGAP1L and ACAT1 and wherein an individual Group B HVaSIRS biomarker is an expression product of a gene selected from the group consisting of: EPHX2, CCR7, MAL, LEF1, TRAF3IP3, PIK3IP1, ITM2C, LDLRAP1, NOSIP, ARHGEF18, SATB1, ITPKB, TBC1D4, FLT3LG, DHRS3, RBM4B, HSD17B8, MLLT11, TMC6, PLEKHB1, ALDOC, RPL22, EEF1G, TOP2B, BACH2, BNIP3, ADSL, GRWD1, RPL1OA, TMEM134, ETS1, CRY2, SERBP1, RPS5, ZW10, EIF4B, PEX11B, PHB2, SERPINE2, SRM, LSM7, RPL15, RBM17, DGKA, PTOV1, HIC2, NET1, XPC, SLC5A6, SERTAD2, TMEM39B, RPL27, RPL11, C6orf48, WDR61, PFKP, EIF2S3, NECAP2, RPL30, NACA, NGFRAP1, RPS9, RALA, COX411, UBE2D2 and VPS35.

[0031] In other illustrative examples, one biomarker of a biomarker pair is selected from Group C HVaSIRS biomarkers and the other is selected from Group D HVaSIRS biomarkers, wherein an individual Group C HVaSIRS biomarker is an expression product of a gene selected from the group consisting of: RUNX3, GPR56, LBH, POP5, SYNE2, TPST2, RPL36, GALNT10, GFI1, MZF1, SREBF1, AKAP11, CAMK1D, CYB561, BTG3, CST7, SVIL, EIF2AK2, ARNTL, ZBP1, ADCY7, SYPL1 and HERC6, and wherein an individual Group D HVaSIRS biomarker is an expression product of a gene selected from the group consisting of: CD79B, CD79A, VPREB3, TCL1A, LAMA5, BCL11A, TCF4, DPEP2, RPAIN, RAB3GAP1, MED25 and LRMP.

[0032] In other illustrative examples, one biomarker of a biomarker pair is selected from Group E HVaSIRS biomarkers and the other is selected from Group F HVaSIRS biomarkers, wherein an individual Group E HVaSIRS biomarker is an expression product of a gene selected from the group consisting of: TMUB2, ARSB, C1QB, PFKL, EHD1, PRDM1, IKBKG, TAP1, TANK, PARP3, OASL, ADCY3, FAM129A, SQRDL, UBR2, IFITM1, CYLD, ACSL1, PXN, UBE2L6, IL4R, COL17A1, TXN, CD300A, LDLR, TBK1, HERC5, TDRD7, KPNB1, IFI44, CASP4 and IFI16 and wherein an individual Group F HVaSIRS biomarker is an expression product of a gene selected from the group consisting of: GPR162, NAALADL1, LTBP3, REC8, CD37, TPK1, GDPD5, SAC3D1, SPINT2 and CD93.

[0033] In some embodiments, biomarker values are measured or derived for a Group A HVaSIRS biomarker and for a Group B HVaSIRS biomarker, and the indicator is determined by combining the biomarker values. In some embodiments, biomarker values are measured or derived for a Group C HVaSIRS biomarker and for a Group D HVaSIRS biomarker, and the indicator is determined by combining the biomarker values. In some embodiments, biomarker values are measured or derived for a Group E HVaSIRS biomarker and for a Group F HVaSIRS biomarker, and the indicator is determined by combining the biomarker values. In other embodiments, biomarker values are measured or derived for a Group A HVaSIRS biomarker, for a Group B HVaSIRS biomarker, for a Group C HVaSIRS biomarker and for a Group D HVaSIRS biomarker, and the indicator is determined by combining the biomarker values. In other embodiments, biomarker values are measured or derived for a Group A HVaSIRS biomarker, for a Group B HVaSIRS biomarker, for a Group C HVaSIRS biomarker, for a Group D HVaSIRS biomarker, for a Group E HVaSIRS biomarker, for a Group F HVaSIRS biomarker, and the indicator is determined by combining the biomarker values. Suitably, in the above embodiments, the methods comprise combining the biomarker values using a combining function, wherein the combining function is at least one of: an additive model; a linear model; a support vector machine; a neural network model; a tree-learning method (e.g., random forest model); a regression model; a genetic algorithm; an annealing algorithm; a weighted sum; a nearest neighbor model; an ensemble method (e.g., bagging, boosting weighted averaging); and a probabilistic model.

[0034] In some embodiments, the methods comprise: (a) determining a pair of biomarker values, each biomarker value being a value measured or derived for at least one corresponding HVaSIRS biomarker; (b) determining a derived biomarker value using the pair of biomarker values, the derived biomarker value being indicative of a ratio of concentrations of the pair of HVaSIRS biomarkers; and determining the indicator using the derived marker value. In illustrative examples of this type, biomarker values are measured or derived for a Group A HVaSIRS biomarker and for a Group B HVaSIRS biomarker to obtain the pair of biomarker values and the derived biomarker value is determined using the pair of biomarker values. In other illustrative examples, biomarker values are measured or derived for a Group C HVaSIRS biomarker and for a Group D HVaSIRS biomarker to obtain the pair of biomarker values and the derived biomarker value is determined using the pair of biomarker values. In other illustrative examples, biomarker values are measured or derived for a Group E HVaSIRS biomarker and for a Group F HVaSIRS biomarker to obtain the pair of biomarker values and the derived biomarker value is determined using the pair of biomarker values.

[0035] In some embodiments, the methods comprise: (a) determining a first derived biomarker value using a first pair of biomarker values, the first derived biomarker value being indicative of a ratio of concentrations of first and second HVaSIRS biomarkers; (b) determining a second derived biomarker value using a second pair of biomarker values, the second derived biomarker value being indicative of a ratio of concentrations of third and fourth HVaSIRS biomarkers; (c) determining a third derived biomarker value using a third pair of biomarker values, the third derived biomarker value being indicative of a ratio of concentrations of fifth and sixth HVaSIRS biomarkers; and (d) determining the indicator by combining the first, second and third derived biomarker values. Suitably, the first HVaSIRS biomarker is selected from Group A HVaSIRS biomarkers, the second HVaSIRS biomarker is selected from Group B HVaSIRS biomarkers, the third HVaSIRS biomarker is selected from Group C HVaSIRS biomarkers, the fourth HVaSIRS biomarker is selected from Group D HVaSIRS biomarkers, the fifth HVaSIRS biomarker is selected from Group E HVaSIRS biomarkers, and the sixth HVaSIRS biomarker is selected from Group F HVaSIRS biomarkers. In illustrative examples of this type, the methods comprise combining the biomarker values using a combining function, wherein the combining function is at least one of: an additive model; a linear model; a support vector machine; a neural network model; a tree-learning method (e.g., random forest model); a regression model; a genetic algorithm; an annealing algorithm; a weighted sum; a nearest neighbor model; an ensemble method (e.g., bagging, boosting weighted averaging); and a probabilistic model.

[0036] Suitably, in embodiments that utilize pairs of HVaSIRS biomarkers as broadly described above and elsewhere herein, an individual pair of HVaSIRS biomarkers has a mutual correlation in respect of HVaSIRS that lies within a mutual correlation range, the mutual correlation range being between ±0.9 (or between ±0.8, ±0.7, ±0.6, ±0.5, ±0.4, ±0.3, ±0.2 or ±0.1) and the indicator has a performance value greater than or equal to a performance threshold representing the ability of the indicator to diagnose the presence, absence or degree of HVaSIRS, wherein the performance threshold is indicative of an explained variance of at least 0.3. In illustrative examples of this type, an individual HVaSIRS biomarker has a condition correlation with the presence, absence or degree of HVaSIRS that lies outside a condition correlation range, wherein the condition correlation range is between ±0.3. In other illustrative examples, an individual HVaSIRS biomarker has a condition correlation with the presence, absence or degree of HVaSIRS that lies outside a condition correlation range, wherein the condition correlation range is at least one of ±0.9, ±0.8, ±0.7, ±0.6, ±0.5 or ±0.4. In specific embodiments, the performance threshold is indicative of an explained variance of at least one of 0.4, 0.5, 0.6, 0.7, 0.8 and 0.9.

[0037] In certain embodiments that utilize pairs of HVaSIRS biomarkers as broadly described above and elsewhere herein the Group A HVaSIRS biomarker is suitably an expression product of CCL5, the Group B HVaSIRS biomarker is suitably an expression product of FLNB, the Group C HVaSIRS biomarker is suitably an expression product of PPP2R2B, the Group D HVaSIRS biomarker is suitably an expression product of GNG7, the Group E HVaSIRS biomarker is suitably an expression product of CASZ1, and the Group F HVaSIRS biomarker is suitably an expression product of VASH1.

[0038] The herpesvirus associated with the HVaSIRS is suitably selected from any herpesvirus that preferably affects mammals, which is capable of inducing at least one of the clinical signs of SIRS, illustrative examples of which include human herpesviruses 1-8 (HHV1-8) (Herpes simplex virus 1 and 2, Varicella Zoster virus, Epstein-Barr virus, Cytomegalovirus, Roseolovirus, Herpes simplex virus 7, and Kaposi's sarcoma-associated virus).

[0039] Another aspect of the present invention provides apparatus for determining an indicator used in assessing a likelihood of a subject having a presence, absence or degree of HVaSIRS. This apparatus generally comprises at least one electronic processing device that:

[0040] determines a pair of biomarker values, each biomarker value being a value measured or derived for at least one corresponding HVaSIRS biomarker, as broadly described above and elsewhere herein, of a sample taken from the subject and being at least partially indicative of a concentration of the HVaSIRS biomarker in the sample;

[0041] determines a derived biomarker value using the pair of biomarker values, the derived biomarker value being indicative of a ratio of concentrations of the pair of HVaSIRS biomarkers; and

[0042] determines the indicator using the derived biomarker value.

[0043] In yet another aspect, the present invention provides compositions for determining an indicator used in assessing a likelihood of a subject having a presence, absence or degree of HVaSIRS. These compositions generally comprise, consist or consist essentially of at least one pair of cDNAs and at least one oligonucleotide primer or probe that hybridizes to an individual one of the cDNAs, wherein the at least one pair of cDNAs is selected from pairs of cDNAs including a first pair, a second pair and a third pair of cDNAs, wherein the first pair comprises a Group A HVaSIRS biomarker cDNA and a Group B HVaSIRS biomarker cDNA, and wherein the second pair comprises a Group C HVaSIRS biomarker cDNA and a Group D HVaSIRS biomarker cDNA, and wherein the third pair comprises a Group E HVaSIRS biomarker cDNA and a Group F HVaSIRS biomarker cDNA. Suitably, the compositions comprise a population of cDNAs corresponding to mRNA derived from a cell or cell population. In some embodiments, the cell is a cell of the immune system, suitably a leukocyte. In some embodiments, the cell population is blood, suitably peripheral blood. In some embodiments, the at least one oligonucleotide primer or probe is hybridized to an individual one of the cDNAs. In any of the above embodiments, the composition may further comprise a labeled reagent for detecting the cDNA. In illustrative examples of this type, the labeled reagent is a labeled said at least one oligonucleotide primer or probe. In other embodiments, the labeled reagent is a labeled said cDNA. Suitably, the at least one oligonucleotide primer or probe is in a form other than a high density array.

[0044] Still another aspect of the present invention provides kits for determining an indicator indicative of the likelihood of the presence, absence or degree of HVaSIRS. The kits generally comprise, consist or consist essentially of at least one pair of reagents selected from reagent pairs including a first pair of reagents, a second pair of reagents and a third pair of reagents, wherein the first pair of reagents comprises (i) a reagent that allows quantification of a Group A HVaSIRS biomarker; and (ii) a reagent that allows quantification of a Group B HVaSIRS biomarker, wherein the second pair of reagents comprises: (iii) a reagent that allows quantification of a Group C HVaSIRS biomarker; and (iv) a reagent that allows quantification of a Group D HVaSIRS biomarker, and wherein the third pair of reagents comprises: (v) a reagent that allows quantification of a Group E HVaSIRS biomarker; and (vi) a reagent that allows quantification of a Group F HVaSIRS biomarker.

[0045] In a further aspect, the present invention provides methods for managing a subject with HVaSIRS. These methods generally comprise, consist or consist essentially of: exposing the subject to a treatment regimen for treating HVaSIRS, or avoiding exposing the subject to a treatment regimen for treating a SIRS other than HVaSIRS based on an indicator obtained from an indicator-determining method, wherein the indicator is indicative of the presence of HVaSIRS in the subject, and wherein the indicator-determining method is an indicator-determining method as broadly described above and elsewhere herein. In some embodiments, the methods further comprise taking a sample from the subject and determining an indicator indicative of the likelihood of the presence, absence or degree of HVaSIRS using the indicator-determining method. In other embodiments, the methods further comprise sending a sample taken from the subject to a laboratory at which the indicator is determined according to the indicator-determining method. In these embodiments, the methods suitably further comprise receiving the indicator from the laboratory.

[0046] Yet another aspect of the present invention provides methods of monitoring the efficacy of a particular treatment regimen in a subject towards a desired health state (e.g., absence of HVaSIRS). These methods generally comprise, consist or consist essentially of: (1) determining biomarker values that are measured or derived for at least two (e.g., 2, 3, 4, 5, 6, 7, 8, 9, 10, or more) corresponding HVaSIRS biomarkers as broadly defined above in a sample taken from the subject and that are at least partially indicative of respective levels of the HVaSIRS biomarkers in the sample, wherein the sample is taken after treatment of the subject with the treatment regimen; (2) determining an indicator using the biomarker values, wherein the indicator is used in assessing a likelihood of the subject having a presence, absence or degree of HVaSIRS, and (3) assessing the likelihood of the subject having a presence, absence or degree of HVaSIRS using the indicator to thereby determine whether the treatment regimen is effective for changing the health status of the subject to the desired health state.

[0047] In another aspect, the present invention provides methods of determining whether a treatment regimen is effective for treating a subject with HVaSIRS. These methods generally comprise, consist or consist essentially of: (a) correlating biomarker values that are measured or derived for at least two (e.g., 2, 3, 4, 5, 6, 7, 8, 9, 10, or more) corresponding HVaSIRS biomarkers as broadly defined above with an effective treatment regimen; (b) determining respective biomarker values that are measured or derived for the at least two corresponding HVaSIRS biomarkers in a sample taken from the subject after treatment with the treatment regimen; (c) determining an indicator using the biomarker values, wherein the indicator is used in assessing a likelihood of the subject having a presence, absence or degree of HVaSIRS, (d) assessing the likelihood of the subject having a presence, absence or degree of HVaSIRS using the indicator to thereby determine whether the treatment regimen is effective for treating HVaSIRS in the subject.

[0048] A further aspect of the present invention provides methods of correlating biomarker values that are measured or derived for at least two (e.g., 2, 3, 4, 5, 6, 7, 8, 9, 10, or more) corresponding HVaSIRS biomarker as broadly defined above with a positive or negative response to a treatment regimen. These methods generally comprise, consist or consist essentially of: (a) determining respective biomarker values for the at least two corresponding HVaSIRS biomarkers in a sample taken from a subject with HVaSIRS following commencement of the treatment regimen, wherein the biomarker values are at least partially indicative of respective levels of the HVaSIRS biomarkers in the sample; and (c) correlating the sample HVaSIRS biomarker values with a positive or negative response to the treatment regimen.

[0049] Another aspect of the present invention provides methods of determining a positive or negative response to a treatment regimen by a subject with HVaSIRS. These methods generally comprise, consist or consist essentially of: (a) correlating reference biomarker values that are measured or derived for at least two (e.g., 2, 3, 4, 5, 6, 7, 8, 9, 10, or more) corresponding HVaSIRS biomarker as broadly defined above with a positive or negative response to the treatment regimen; and (b) determining respective biomarker values for the at least two corresponding HVaSIRS biomarkers in a sample taken from a subject with HVaSIRS, wherein the sample biomarker values indicate whether the subject is responding to the treatment regimen.

[0050] In some embodiments, the methods of determining a positive or negative response to a treatment regimen further comprise: (i) determining first sample biomarker values for the at least two corresponding HVaSIRS biomarkers as broadly defined above in a sample taken from the subject prior to commencing the treatment regimen; and (ii) comparing the first sample biomarker values with second sample biomarker values for the at least two corresponding HVaSIRS biomarkers taken from the subject after commencement of the treatment regimen, to thereby determine a positive or negative response to the treatment regimen.

[0051] Another aspect of the present invention provides methods of treating, preventing or inhibiting the development of HVaSIRS in a subject. These methods generally comprise, consist or consist essentially of: exposing the subject to a treatment regimen for treating HVaSIRS, or avoiding exposing the subject to a treatment regimen for treating a SIRS other than HVaSIRS based on an indicator obtained from an indicator-determining method, the indicator-determining method comprising, consisting or consisting essentially of: (a) determining a plurality of biomarker values for at least two (e.g., 2, 3, 4, 5, 6, 7, 8, 9, 10, or more) HVaSIRS biomarkers as broadly defined above of the subject, each biomarker value being indicative of a value measured or derived for a respective HVaSIRS biomarker; (b) determining an indicator using a combination of the plurality of biomarker values, the indicator being at least partially indicative of the presence, absence or degree of HVaSIRS, wherein: (i) at least two (e.g., 2, 3, 4, 5, 6, 7, 8, 9, 10, or more) HVaSIRS biomarkers have a mutual correlation in respect of HVaSIRS that lies within a mutual correlation range, the mutual correlation range being between ±0.9; and (ii) the indicator has a performance value greater than or equal to a performance threshold representing the ability of the indicator to diagnose the presence, absence or degree of HVaSIRS, the performance threshold being indicative of an explained variance of at least 0.3.

[0052] Suitably, the method further comprises: (1) determining a plurality of measured biomarker values, each measured biomarker value being a measured value of HVaSIRS biomarker of the subject; and (2) applying a function to at least two of the measured biomarker values to determine at least one derived biomarker value, the at least one derived biomarker value being indicative of a value of a corresponding derived HVaSIRS biomarker.

[0053] Suitably, the function includes at least one of: (a) multiplying two biomarker values; (b) dividing two biomarker values; (c) adding two biomarker values; (d) subtracting two biomarker values; (e) a weighted sum of at least two biomarker values; (f) a log sum of at least two biomarker values; (g) a geometric mean of at least two biomarker values; and (h) a sigmoidal function of at least two biomarker values.

[0054] In another aspect of the present invention, methods are provided for monitoring the efficacy of a particular treatment regimen in a subject towards a desired health state. These methods generally comprise, consist or consist essentially of: (a) determining a plurality of biomarker values for at least two (e.g., 2, 3, 4, 5, 6, 7, 8, 9, 10, or more) HVaSIRS biomarkers as broadly defined above of the subject after treatment with a treatment regimen, each biomarker value being indicative of a value measured or derived for a respective HVaSIRS biomarker; (b) determining an indicator using a combination of the plurality of biomarker values, the indicator being at least partially indicative of the presence, absence or degree of HVaSIRS, wherein: (i) at least two (e.g., 2, 3, 4, 5, 6, 7, 8, 9, 10, or more) HVaSIRS biomarkers have a mutual correlation in respect of HVaSIRS that lies within a mutual correlation range, the mutual correlation range being between ±0.9; and (ii) the indicator has a performance value greater than or equal to a performance threshold representing the ability of the indicator to diagnose the presence, absence or degree of HVaSIRS, or to provide a prognosis for a HVaSIRS, the performance threshold being indicative of an explained variance of at least 0.3, and (c) determining that the treatment regimen is effective for changing the health status of the subject to the desired health state on the basis that the indicator indicates the presence of HVaSIRS or the presence of HVaSIRS of a lower degree relative to the degree of HVaSIRS in the subject before treatment with the treatment regimen.

[0055] Still other aspects of the present invention contemplate the use of the indicator-determining methods as broadly described above and elsewhere herein in methods for correlating a biomarker profile with an effective treatment regimen for HVaSIRS, or for determining whether a treatment regimen is effective for treating a subject with HVaSIRS, or for correlating a biomarker profile with a positive or negative response to a treatment regimen, or for determining a positive or negative response to a treatment regimen by a subject with HVaSIRS.

### BRIEF DESCRIPTION OF THE DRAWINGS

[0056] FIG. 1 is a plot of area under curve (AUC) obtained across the positive and negative validation datasets (combined) when sequentially adding a further nine derived biomarkers to the best performing single derived biomarker (CCL5/FLNB). The combination of CCL5/FLNB, PPP2R2B/GNG7 and CASZ1/VASH1 is considered to have the optimal commercial utility with the lowest risk of introduction of noise.

[0057] FIG. 2 is a plot of AUC obtained across the positive and negative validation datasets individually when sequentially adding a further nine derived biomarkers to the best performing single derived biomarker (CCL5/FLNB). The combination of CCL5/FLNB, PPP2R2B/GNG7 and CASZ1/VASH1 is considered to have the optimal commercial utility with the lowest risk of introduction of noise and the greatest difference between positive and negative validation datasets.

[0058] FIG. 3 shows receiver operating characteristic (ROC)—AUC results for the Positive validation sets after data was normalized and scaled to form a single dataset.

[0059] FIG. 4 shows box and whisker plots of the performance of the best derived biomarker CCL5/FLNB across each of the individual datasets. “Negative validation” datasets are depicted in the top row and “positive validation” datasets are depicted in the bottom row.

[0060] FIG. 5 shows plots of the performance of the best combination of derived biomarkers CCL5/FLNB and PPP2R2B/GNG7 across each of the individual datasets. “Negative validation” datasets are depicted in the top row and “positive validation” datasets are depicted in the bottom row.

[0061] FIG. 6 shows plots of the performance of the best combination of derived biomarkers CCL5/FLNB, PPP2R2B/GNG7 and CASZ1/VASH1 across each of the individual datasets. “Negative validation” datasets are depicted in the top row and “positive validation” datasets are depicted in the bottom row.

[0062] FIG. 7 shows a plot of the most frequently observed numerators in single ratio combinations.

[0063] FIG. 8 shows a plot of the most frequently observed denominators in single ratio combinations.

[0064] FIG. 9 is an example output depicting an indicator that is useful for assessing the presence of HVaSIRS in a patient.

### DETAILED DESCRIPTION OF THE INVENTION

### 1. Definitions

[0065] Unless defined otherwise, all technical and scientific terms used herein have the same meaning as commonly understood by those of ordinary skill in the art to which the invention belongs. Although any methods and materials similar or equivalent to those described herein can be used in the practice or testing of the present invention, preferred methods and materials are described. For the purposes of the present invention, the following terms are defined below.

[0066] The articles “a” and “an” are used herein to refer to one or to more than one (i.e., to at least one) of the grammatical object of the article. By way of example, “an element” means one element or more than one element.

[0067] As used herein, “and/or” refers to and encompasses any and all possible combinations of one or more of the associated listed items, as well as the lack of combinations when interpreted in the alternative (or).

[0068] The term “biomarker” broadly refers to any detectable compound, such as a protein, a peptide, a proteoglycan, a glycoprotein, a lipoprotein, a carbohydrate, a lipid, a nucleic acid (e.g., DNA, such as cDNA or amplified DNA, or RNA, such as mRNA), an organic or inorganic chemical, a natural or synthetic polymer, a small molecule (e.g., a metabolite), or a discriminating molecule or discriminating fragment of any of the foregoing, that is present in or derived from a sample. “Derived from” as used in this context refers to a compound that, when detected, is indicative of a particular molecule being present in the sample. For example, detection of a particular cDNA can be indicative of the presence of a particular RNA transcript in the sample. As another example, detection of or binding to a particular antibody can be indicative of the presence of a particular antigen (e.g., protein) in the sample. Here, a discriminating molecule or fragment is a molecule or fragment that, when detected, indicates presence or abundance of an above-identified compound. A biomarker can, for example, be isolated from a sample, directly measured in a sample, or detected in or determined to be in a sample. A biomarker can, for example, be functional, partially functional, or non-functional. In specific embodiments, the “biomarkers” include “immune system biomarkers”, which are described in more detail below.

[0069] The term “biomarker value” refers to a value measured or derived for at least one corresponding biomarker of a subject and which is typically at least partially indicative of an abundance or concentration of a biomarker in a sample taken from the subject. Thus, the biomarker values could be measured biomarker values, which are values of biomarkers measured for the subject, or alternatively could be derived biomarker values, which are values that have been derived from one or more measured biomarker values, for example by applying a function to the one or more measured biomarker values. Biomarker values can be of any appropriate form depending on the manner in which the values are determined. For example, the biomarker values could be determined using high-throughput technologies such as mass spectrometry, sequencing platforms, array and hybridization platforms, immunoassays, flow cytometry, or any combination of such technologies and in one preferred example, the biomarker values relate to a level of activity or abundance of an expression product or other measurable molecule, quantified using a technique such as PCR, sequencing or the like. In this case, the biomarker values can be in the form of amplification amounts, or cycle times, which are a logarithmic representation of the concentration of the biomarker within a sample, as will be appreciated by persons skilled in the art and as will be described in more detail below.

[0070] The term “biomarker profile” refers to one or a plurality of one or more types of biomarkers (e.g., an mRNA molecule, a cDNA molecule and/or a protein, etc.), or an indication thereof, together with a feature, such as a measurable aspect (e.g., biomarker value) of the biomarker(s). A biomarker profile may comprise a single biomarker whose level, abundance or amount correlates with the presence, absence or degree of a condition (e.g., a healthy condition or HVaSIRS). Alternatively, a biomarker profile may comprise at least two such biomarkers or indications thereof, where the biomarkers can be in the same or different classes, such as, for example, a nucleic acid and a polypeptide. Thus, a biomarker profile may comprise at least 2, 3, 4, 5, 6, 7, 8, 9, 10, 11, 12, 13, 14, 15, 16, 17, 18, 19, 20, 21, 22, 23, 24, 25, 30, 35, 40, 45, 50, 55, 60, 65, 70, 75, 80, 85, 90, 95, or 100 or more biomarkers or indications thereof. In some embodiments, a biomarker profile comprises hundreds, or even thousands, of biomarkers or indications thereof. A biomarker profile can further comprise one or more controls or internal standards. In certain embodiments, the biomarker profile comprises at least one biomarker, or indication thereof, that serves as an internal standard. In other embodiments, a biomarker profile comprises an indication of one or more types of biomarkers. The term “indication” as used herein in this context merely refers to a situation where the biomarker profile contains symbols, data, abbreviations or other similar indicia for a biomarker, rather than the biomarker molecular entity itself. The term “biomarker profile” is also used herein to refer to a biomarker value or combination of at least two biomarker values, wherein individual biomarker values correspond to values of biomarkers that can be measured or derived from one or more subjects, which combination is characteristic of a discrete condition, stage of condition, subtype of condition or a prognosis for a discrete condition, stage of condition, subtype of condition. The term “profile biomarkers” is used to refer to a subset of the biomarkers that have been identified for use in a biomarker profile that can be used in performing a clinical assessment, such as to rule in or rule out a specific condition, different stages or severity of conditions, subtypes of different conditions or different prognoses. The number of profile biomarkers will vary, but is typically of the order of 10 or less.

[0071] The terms “complementary” and “complementarity” refer to polynucleotides (i.e., a sequence of nucleotides) related by the base-pairing rules. For example, the sequence “A-G-T,” is complementary to the sequence “T-C-A.” Complementarity may be “partial,” in which only some of the nucleic acids' bases are matched according to the base pairing rules. Or, there may be “complete” or “total” complementarity between the nucleic acids. The degree of complementarity between nucleic acid strands has significant effects on the efficiency and strength of hybridization between nucleic acid strands.

[0072] Throughout this specification, unless the context requires otherwise, the words “comprise,” “comprises” and “comprising” will be understood to imply the inclusion of a stated step or element or group of steps or elements but not the exclusion of any other step or element or group of steps or elements. Thus, use of the term “comprising” and the like indicates that the listed elements are required or mandatory, but that other elements are optional and may or may not be present. By “consisting of” is meant including, and limited to, whatever follows the phrase “consisting of”. Thus, the phrase “consisting of” indicates that the listed elements are required or mandatory, and that no other elements may be present. By “consisting essentially of” is meant including any elements listed after the phrase, and limited to other elements that do not interfere with or contribute to the activity or action specified in the disclosure for the listed elements. Thus, the phrase “consisting essentially of” indicates that the listed elements are required or mandatory, but that other elements are optional and may or may not be present depending upon whether or not they affect the activity or action of the listed elements.

[0073] The term “correlating” refers to determining a relationship between one type of data with another or with a state.

[0074] The term “degree” of HVaSIRS, as used herein, refers to the seriousness, severity, stage or state of a HVaSIRS. For example, a HVaSIRS may be characterized as mild, moderate or severe. A person of skill in the art would be able to determine or assess the degree of a particular HVaSIRS. For example, the degree of a HVaSIRS may be determined by comparing the likelihood or length of survival of a subject having a HVaSIRS with the likelihood or length of survival in other subjects having HVaSIRS. In other embodiments, the degree of a HVaSIRS may be determined by comparing the clinical signs of a subject having a condition with the degree of the clinical signs in other subjects having HVaSIRS.

[0075] As used herein, the terms “diagnosis”, “diagnosing” and the like are used interchangeably herein to encompass determining the likelihood that a subject will develop a condition, or the existence or nature of a condition in a subject. These terms also encompass determining the severity of disease or episode of disease, as well as in the context of rational therapy, in which the diagnosis guides therapy, including initial selection of therapy, modification of therapy (e.g., adjustment of dose or dosage regimen), and the like. By “likelihood” is meant a measure of whether a subject with particular measured or derived biomarker values actually has a condition (or not) based on a given mathematical model. An increased likelihood for example may be relative or absolute and may be expressed qualitatively or quantitatively. For instance, an increased likelihood may be determined simply by determining the subject's measured or derived biomarker values for at least two HVaSIRS biomarkers and placing the subject in an “increased likelihood” category, based upon previous population studies. The term “likelihood” is also used interchangeably herein with the term “probability”. The term “risk” relates to the possibility or probability of a particular event occurring at some point in the future. “Risk stratification” refers to an arraying of known clinical risk factors to allow physicians to classify patients into a low, moderate, high or highest risk of developing a particular disease or condition.

[0076] The term “gene”, as used herein, refers to a stretch of nucleic acid that codes for a polypeptide or for an RNA chain that has a function. While it is the exon region of a gene that is transcribed to form mRNA, the term “gene” also includes regulatory regions such as promoters and enhancers that govern expression of the exon region.

[0077] The term “high-density array” refers to a substrate or collection of substrates or surfaces bearing a plurality of array elements (e.g., discrete regions having particular moieties, e.g., proteins (e.g., antibodies), nucleic acids (e.g., oligonucleotide probes), etc., immobilized thereto), where the array elements are present at a density of about 100 elements/cm² or more, about 1,000 elements/cm² or more, about 10,000 elements/cm² or more, or about 100,000 elements/cm^{Z} or more. In specific embodiments, a “high-density array” is one that comprises a plurality of array elements for detecting about 100 or more different biomarkers, about 1,000 or more different biomarkers, about 10,000 or more different biomarkers, or about 100,000 or more different biomarkers. In representative example of these embodiments, a “high-density array” is one that comprises a plurality of array elements for detecting biomarkers of about 100 or more different genes, of about 1,000 or more different genes, of about 10,000 or more different genes, or of about 100,000 or more different genes. Generally, the elements of a high-density array are not labeled. The term “low-density array” refers to a substrate or collection of substrates or surfaces bearing a plurality of array elements (e.g., discrete regions having particular moieties, e.g., proteins (e.g., antibodies), nucleic acids (e.g., oligonucleotide probes), etc., immobilized thereto), where the array elements are present at a density of about 100 elements/cm² or less, about 50 elements/cm² or less, about 20 elements/cm² or less, or about 10 elements/cm² or less. In specific embodiments, a “low-density array” is one that comprises a plurality of array elements for detecting about 100 or less different biomarkers, about 50 or less different biomarkers, about 20 or less different biomarkers, or about 10 or less different biomarkers. In representative example of these embodiments, a “low-density array” is one that comprises a plurality of array elements for detecting biomarkers of about 100 or less different genes, of about 50 or less different genes, of about 20 or less different genes, or of about 10 or less different genes. Generally, the elements of a low-density array are not labeled.

[0078] The term “indicator” as used herein refers to a result or representation of a result, including any information, number, ratio, signal, sign, mark, or note by which a skilled artisan can estimate and/or determine a likelihood or risk of whether or not a subject is suffering from a given disease or condition. In the case of the present invention, the “indicator” may optionally be used together with other clinical characteristics, to arrive at a diagnosis (that is, the occurrence or nonoccurrence) of HVaSIRS or a prognosis for a HVaSIRS in a subject. That such an indicator is “determined” is not meant to imply that the indicator is 100% accurate. The skilled clinician may use the indicator together with other clinical indicia to arrive at a diagnosis.

[0079] The term “immobilized” means that a molecular species of interest is fixed to a solid support, suitably by covalent linkage. This covalent linkage can be achieved by different means depending on the molecular nature of the molecular species. Moreover, the molecular species may be also fixed on the solid support by electrostatic forces, hydrophobic or hydrophilic interactions or Van-der-Waals forces. The above described physico-chemical interactions typically occur in interactions between molecules. In particular embodiments, all that is required is that the molecules (e.g., nucleic acids or polypeptides) remain immobilized or attached to a support under conditions in which it is intended to use the support, for example in applications requiring nucleic acid amplification and/or sequencing or in in antibody-binding assays. For example, oligonucleotides or primers are immobilized such that a 3′ end is available for enzymatic extension and/or at least a portion of the sequence is capable of hybridizing to a complementary sequence. In some embodiments, immobilization can occur via hybridization to a surface attached primer, in which case the immobilized primer or oligonucleotide may be in the 3′-5′ orientation. In other embodiments, immobilization can occur by means other than base-pairing hybridization, such as the covalent attachment.

[0080] The term “immune system”, as used herein, refers to cells, molecular components and mechanisms, including antigen-specific and non-specific categories of the adaptive and innate immune systems, respectively, that provide a defense against damage and insults resulting from a viral infection. The term “innate immune system” refers to a host's non-specific reaction to insult to include antigen-nonspecific defense cells, molecular components and mechanisms that come into action immediately or within several hours after exposure to almost any insult or antigen. Elements of the innate immunity include for example phagocytic cells (monocytes, macrophages, dendritic cells, polymorphonuclear leukocytes such as neutrophils, reticuloendothelial cells such as Küffer cells, and microglia), cells that release inflammatory mediators (basophils, mast cells and eosinophils), natural killer cells (NK cells) and physical barriers and molecules such as keratin, mucous, secretions, complement proteins, immunoglobulin M (IgM), acute phase proteins, fibrinogen and molecules of the clotting cascade, and cytokines. Effector compounds of the innate immune system include chemicals such as lysozymes, IgM, mucous and chemoattractants (e.g., cytokines or histamine), complement and clotting proteins. The term “adaptive immune system” refers to antigen-specific cells, molecular components and mechanisms that emerge over several days, and react with and remove a specific antigen. The adaptive immune system develops throughout a host's lifetime. The adaptive immune system is based on leukocytes, and is divided into two major sections: the humoral immune system, which acts mainly via immunoglobulins produced by B cells, and the cell-mediated immune system, which functions mainly via T cells.

[0081] Reference herein to “immuno-interactive” includes reference to any interaction, reaction, or other form of association between molecules and in particular where one of the molecules is, or mimics, a component of the immune system.

[0082] The term “label” is used herein in a broad sense to refer to an agent that is capable of providing a detectable signal, either directly or through interaction with one or more additional members of a signal producing system and that has been artificially added, linked or attached via chemical manipulation to a molecule. Labels can be visual, optical, photonic, electronic, acoustic, opto-acoustic, by mass, electro-chemical, electro-optical, spectrometry, enzymatic, or otherwise chemically, biochemically hydrodynamically, electrically or physically detectable. Labels can be, for example tailed reporter, marker or adapter molecules. In specific embodiments, a molecule such as a nucleic acid molecule is labeled with a detectable molecule selected form the group consisting of radioisotopes, fluorescent compounds, bioluminescent compounds, chemiluminescent compounds, metal chelators or enzymes. Examples of labels include, but are not limited to, the following radioisotopes (e.g., ³H, ¹⁴C, ³⁵S, ¹²⁵I, ¹³¹I), fluorescent labels (e.g., FITC, rhodamine, lanthanide phosphors), luminescent labels such as luminol; enzymatic labels (e.g., horseradish peroxidase, beta-galactosidase, luciferase, alkaline phosphatase, acetylcholinesterase), biotinyl groups (which can be detected by marked avidin, e.g., streptavidin containing a fluorescent marker or enzymatic activity that can be detected by optical or calorimetric methods), predetermined polypeptide epitopes recognized by a secondary reporter (e.g., leucine zipper pair sequences, binding sites for secondary antibodies, metal binding domains, epitope tags).

[0083] The term “microarray” refers to an arrangement of hybridizable array elements, e.g., probes (including primers), ligands, biomarker nucleic acid sequence or protein sequences on a substrate.

[0084] The term “nucleic acid” or “polynucleotide” as used herein includes RNA, mRNA, miRNA, cRNA, cDNA mtDNA, or DNA. The term typically refers to a polymeric form of nucleotides of at least 10 bases in length, either ribonucleotides or deoxynucleotides or a modified form of either type of nucleotide. The term includes single and double stranded forms of DNA or RNA.

[0085] By “obtained” is meant to come into possession. Samples so obtained include, for example, nucleic acid extracts or polypeptide extracts isolated or derived from a particular source. For instance, the extract may be isolated directly from a biological fluid or tissue of a subject.

[0086] As used herein, the term “positive response” means that the result of a treatment regimen includes some clinically significant benefit, such as the prevention, or reduction of severity, of symptoms, or a slowing of the progression of the condition. By contrast, the term “negative response” means that a treatment regimen provides no clinically significant benefit, such as the prevention, or reduction of severity, of symptoms, or increases the rate of progression of the condition.

[0087] “Protein”, “polypeptide” and “peptide” are used interchangeably herein to refer to a polymer of amino acid residues and to variants and synthetic analogues of the same.

[0088] By “primer” is meant an oligonucleotide which, when paired with a strand of DNA, is capable of initiating the synthesis of a primer extension product in the presence of a suitable polymerizing agent. The primer is preferably single-stranded for maximum efficiency in amplification but can alternatively be double-stranded. A primer must be sufficiently long to prime the synthesis of extension products in the presence of the polymerization agent. The length of the primer depends on many factors, including application, temperature to be employed, template reaction conditions, other reagents, and source of primers. For example, depending on the complexity of the target sequence, the primer may be at least about 5, 6, 7, 8, 9, 10, 11, 12, 13, 14, 15, 16, 17, 18, 19, 20, 21, 22, 23, 24, 25, 26, 27, 28, 29, 30, 35, 40, 50, 75, 100, 150, 200, 300, 400, 500, to one base shorter in length than the template sequence at the 3′ end of the primer to allow extension of a nucleic acid chain, though the 5′ end of the primer may extend in length beyond the 3′ end of the template sequence. In certain embodiments, primers can be large polynucleotides, such as from about 35 nucleotides to several kilobases or more. Primers can be selected to be “substantially complementary” to the sequence on the template to which it is designed to hybridize and serve as a site for the initiation of synthesis. By “substantially complementary”, it is meant that the primer is sufficiently complementary to hybridize with a target polynucleotide. Desirably, the primer contains no mismatches with the template to which it is designed to hybridize but this is not essential. For example, non-complementary nucleotide residues can be attached to the 5′ end of the primer, with the remainder of the primer sequence being complementary to the template. Alternatively, non-complementary nucleotide residues or a stretch of non-complementary nucleotide residues can be interspersed into a primer, provided that the primer sequence has sufficient complementarity with the sequence of the template to hybridize therewith and thereby form a template for synthesis of the extension product of the primer.

[0089] As used herein, the term “probe” refers to a molecule that binds to a specific sequence or sub-sequence or other moiety of another molecule. Unless otherwise indicated, the term “probe” typically refers to a nucleic acid probe that binds to another nucleic acid, also referred to herein as a “target polynucleotide”, through complementary base pairing. Probes can bind target polynucleotides lacking complete sequence complementarity with the probe, depending on the stringency of the hybridization conditions. Probes can be labeled directly or indirectly and include primers within their scope.

[0090] The term “prognosis” as used herein refers to a prediction of the probable course and outcome of a clinical condition or disease. A prognosis is usually made by evaluating factors or symptoms of a disease that are indicative of a favorable or unfavorable course or outcome of the disease. The skilled artisan will understand that the term “prognosis” refers to an increased probability that a certain course or outcome will occur; that is, that a course or outcome is more likely to occur in a subject exhibiting a given condition, when compared to those individuals not exhibiting the condition.

[0091] The term “sample” as used herein includes any biological specimen that may be extracted, untreated, treated, diluted or concentrated from a subject. Samples may include, without limitation, biological fluids such as whole blood, serum, red blood cells, white blood cells, plasma, saliva, urine, stool (i.e., faeces), tears, sweat, sebum, nipple aspirate, ductal lavage, tumor exudates, synovial fluid, ascitic fluid, peritoneal fluid, amniotic fluid, cerebrospinal fluid, lymph, fine needle aspirate, amniotic fluid, any other bodily fluid, cell lysates, cellular secretion products, inflammation fluid, semen and vaginal secretions. Samples may include tissue samples and biopsies, tissue homogenates and the like. Advantageous samples may include ones comprising any one or more biomarkers as taught herein in detectable quantities. Suitably, the sample is readily obtainable by minimally invasive methods, allowing the removal or isolation of the sample from the subject. In certain embodiments, the sample contains blood, especially peripheral blood, or a fraction or extract thereof. Typically, the sample comprises blood cells such as mature, immature or developing leukocytes, including lymphocytes, polymorphonuclear leukocytes, neutrophils, monocytes, reticulocytes, basophils, coelomocytes, hemocytes, eosinophils, megakaryocytes, macrophages, dendritic cells natural killer cells, or fraction of such cells (e.g., a nucleic acid or protein fraction). In specific embodiments, the sample comprises leukocytes including peripheral blood mononuclear cells (PBMC).

[0092] The term “solid support” as used herein refers to a solid inert surface or body to which a molecular species, such as a nucleic acid and polypeptides can be immobilized. Non-limiting examples of solid supports include glass surfaces, plastic surfaces, latex, dextran, polystyrene surfaces, polypropylene surfaces, polyacrylamide gels, gold surfaces, and silicon wafers. In some embodiments, the solid supports are in the form of membranes, chips or particles. For example, the solid support may be a glass surface (e.g., a planar surface of a flow cell channel). In some embodiments, the solid support may comprise an inert substrate or matrix which has been “functionalized”, such as by applying a layer or coating of an intermediate material comprising reactive groups which permit covalent attachment to molecules such as polynucleotides. By way of non-limiting example, such supports can include polyacrylamide hydrogels supported on an inert substrate such as glass. The molecules (e.g., polynucleotides) can be directly covalently attached to the intermediate material (e.g., a hydrogel) but the intermediate material can itself be non-covalently attached to the substrate or matrix (e.g., a glass substrate). The support can include a plurality of particles or beads each having a different attached molecular species.

[0093] As used herein, the term SIRS (“systemic inflammatory response syndrome”) refers to a clinical response arising from a non-specific insult with two or more of the following measureable clinical characteristics; a body temperature greater than 38° C. or less than 36° C., a heart rate greater than 90 beats per minute, a respiratory rate greater than 20 per minute, a white blood cell count (total leukocytes) greater than 12,000 per mm³ or less than 4,000 per mm³, or a band neutrophil percentage greater than 10%. From an immunological perspective, it may be seen as representing a systemic response to insult (e.g., major surgery) or systemic inflammation. As used herein, “HVaSIRS” includes any one or more (e.g., 1, 2, 3, 4, 5) of the clinical responses noted above but with underlying herpesvirus infection etiology. Confirmation of infection can be determined using any suitable procedure known in the art, illustrative examples of which include nucleic acid detection (e.g., polymerase chain reaction (PCR), immunological detection (e.g., ELISA), isolation of virus from infected cells, cell lysis and imaging techniques such as electron microscopy. From an immunological perspective, HVaSIRS may be seen as a systemic response to herpesvirus infection, whether it is a local, peripheral or systemic infection.

[0094] The terms “subject”, “individual” and “patient” are used interchangeably herein to refer to an animal subject, particularly a vertebrate subject, and even more particularly a mammalian subject. Suitable vertebrate animals that fall within the scope of the invention include, but are not restricted to, any member of the phylum Chordata, subphylum vertebrata including primates, rodents (e.g., mice rats, guinea pigs), lagomorphs (e.g., rabbits, hares), bovines (e.g., cattle), ovines (e.g., sheep), caprines (e.g., goats), porcines (e.g., pigs), equines (e.g., horses), canines (e.g., dogs), felines (e.g., cats), avians (e.g., chickens, turkeys, ducks, geese, companion birds such as canaries, budgerigars etc.), marine mammals (e.g., dolphins, whales), reptiles (snakes, frogs, lizards, etc.), and fish. A preferred subject is a primate (e.g., a human, ape, monkey, chimpanzee). The subject suitably has at least one (e.g., 1, 2, 3, 4, 5 or more) clinical sign of SIRS.

[0095] As used herein, the term “treatment regimen” refers to prophylactic and/or therapeutic (i.e., after onset of a specified condition) treatments, unless the context specifically indicates otherwise. The term “treatment regimen” encompasses natural substances and pharmaceutical agents (i.e., “drugs”) as well as any other treatment regimen including but not limited to dietary treatments, physical therapy or exercise regimens, surgical interventions, and combinations thereof.

[0096] It will be appreciated that the terms used herein and associated definitions are used for the purpose of explanation only and are not intended to be limiting.

### 2. Herpesvirus Systemic Inflammation Biomarkers and their Use for Identifying Subjects with HVaSIRS

[0097] The present invention concerns methods, apparatus, compositions and kits for identifying subjects with HVaSIRS or for providing a prognosis for subjects with HVaSIRS. In particular, HVaSIRS biomarkers are disclosed for use in these modalities to assess the likelihood of the presence, absence or degree of HVaSIRS in subjects, or for providing a prognosis for subjects with HVaSIRS. The methods, apparatus, compositions and kits of the invention are useful for early detection of HVaSIRS, thus allowing better treatment interventions for subjects with symptoms of SIRS that stem at least in part from a viral infection.

[0098] The present inventors have determined that certain expression products are commonly, specifically and differentially expressed during systemic inflammations with a range of herpesvirus etiologies (e.g., HHV 1, 2, 4, 5, 6), underscoring the conserved nature of the host response to a HVaSIRS. The results presented herein provide clear evidence that a unique biologically-relevant biomarker profile predicts HVaSIRS with a remarkable degree of accuracy. This herpesvirus systemic inflammation biomarker profile was validated in an independently derived external dataset (MARS) (see, Table 3 for details) and used to distinguish HVaSIRS from other SIRS conditions including bacterium associated SIRS (BaSIRS), autoimmune disease associated SIRS (ADaSIRS), cancer associated SIRS (CaSIRS) and non-herpesvirus (influenza virus, Lassa virus, respiratory syncytial virus) virus associated SIRS (nHVVaSIRS) Overall, these findings provide compelling evidence that the expression products disclosed herein can function as biomarkers for HVaSIRS and may potentially serve as a useful diagnostic for triaging treatment decisions for SIRS-affected subjects. In this regard, it is proposed that the methods, apparatus, compositions and kits disclosed herein that are based on these biomarkers may serve in the point-of-care diagnostics that allow for rapid and inexpensive screening for HVaSIRS, which may result in significant cost savings to the medical system as HVaSIRS-affected subjects can be exposed to therapeutic agents that are suitable for treating HVaSIRS as opposed to therapeutic agents for other SIRS conditions.

[0099] Thus, specific expression products are disclosed herein as HVaSIRS biomarkers that provide a means for identifying HVaSIRS and/or for distinguishing HVaSIRS from other SIRS conditions including BaSIRS, ADaSIRS, CaSIRS, TaSIRS and nHVVaSIRS, and/or for providing a prognosis for a subject with HVaSIRS. Evaluation of these HVaSIRS biomarkers through analysis of their levels in a subject or in a sample taken from a subject provides a measured or derived biomarker value for determinating an indicator that can be used for assessing the presence, absence or degree of HVaSIRS in a subject or for providing a prognosis for HVaSIRS in a subject.

[0100] Accordingly, biomarker values can be measured derived biomarker values, which are values that have been derived from one or more measured biomarker values, for example by applying a function to the one or more measured biomarker values. As used herein, biomarkers to which a function has been applied are referred to as “derived markers”.

[0101] The biomarker values may be determined in any one of a number of ways. An exemplary method of determining biomarker values is described by the present inventors in WO 2015/117204, which is incorporated herein by reference in its entirety. In one example, the process of determining biomarker values can include measuring the biomarker values, for example by performing tests on the subject or on sample(s) taken from the subject. More typically however, the step of determining the biomarker values includes having an electronic processing device receive or otherwise obtain biomarker values that have been previously measured or derived. This could include for example, retrieving the biomarker values from a data store such as a remote database, obtaining biomarker values that have been manually input, using an input device, or the like. The indicator is determined using a combination of the plurality of biomarker values, the indicator being at least partially indicative of the presence, absence, degree or prognosis of HVaSIRS. Assuming the method is performed using an electronic processing device, an indication of the indicator is optionally displayed or otherwise provided to the user. In this regard, the indication could be a graphical or alphanumeric representation of an indicator value. Alternatively, however, the indication could be the result of a comparison of the indicator value to predefined thresholds or ranges, or alternatively could be an indication of the presence, absence, degree of a HVaSIRS or prognosis for a HVaSIRS, derived using the indicator.

[0102] In some embodiments, biomarker values are combined, for example by adding, multiplying, subtracting, or dividing biomarker values to determine an indicator value. This step is performed so that multiple biomarker values can be combined into a single indicator value, providing a more useful and straightforward mechanism for allowing the indicator to be interpreted and hence used in diagnosing the presence, absence or degree of HVaSIRS in the subject, or providing a prognosis for a HVaSIRS in the subject.

[0103] In some embodiments in which a plurality of biomarkers and biomarker values are used, in order to ensure that an effective diagnosis or prognosis can be determined, at least two of the biomarkers have a mutual correlation in respect of HVaSIRS that lies within a mutual correlation range, the mutual correlation range being between ±0.9. This requirement means that the two biomarkers are not entirely correlated in respect of each other when considered in the context of the HVaSIRS being diagnosed or prognosed. In other words, at least two of the biomarkers in the combination respond differently as the condition changes, which adds significantly to their ability when combined to discriminate between at least two conditions, to diagnose the presence, absence or degree of HVaSIRS, and/or to provide a prognosis for the HVaSIRS in or of the subject.

[0104] Typically, the requirement that biomarkers have a low mutual correlation means that the biomarkers may relate to different biological attributes or domains such as, but not limited, to different molecular functions, different biological processes and different cellular components. Illustrative examples of molecular function include addition of, or removal of, one of more of the following moieties to, or from, a protein, polypeptide, peptide, nucleic acid (e.g., DNA, RNA): linear, branched, saturated or unsaturated alkyl (e.g., C₁-C₂₄ alkyl); phosphate; ubiquitin; acyl; fatty acid, lipid, phospholipid; nucleotide base; hydroxyl and the like. Molecular functions also include signaling pathways, including without limitation, receptor signaling pathways and nuclear signaling pathways. Non-limiting examples of molecular functions also include cleavage of a nucleic acid, peptide, polypeptide or protein at one or more sites; polymerization of a nucleic acid, peptide, polypeptide or protein; translocation through a cell membrane (e.g., outer cell membrane; nuclear membrane); translocation into or out of a cell organelle (e.g., Golgi apparatus, lysosome, endoplasmic reticulum, nucleus, mitochondria); receptor binding, receptor signaling, membrane channel binding, membrane channel influx or efflux; and the like.

[0105] Illustrative examples of biological processes include: stages of the cell cycle such as meiosis, mitosis, cell division, prophase, metaphase, anaphase, telophase and interphase, stages of cell differentiation; apoptosis; necrosis; chemotaxis; immune responses including adaptive and innate immune responses, pro-inflammatory immune responses, autoimmune responses, tolerogenic responses and the like. Other illustrative examples of biological processes include generating or breaking down adenosine triphosphate (ATP), saccharides, polysaccharides, fatty acids, lipids, phospholipids, sphingolipids, glycolipids, cholesterol, nucleotides, nucleic acids, membranes (e.g., cell plasma membrane, nuclear membrane), amino acids, peptides, polypeptides, proteins and the like. Representative examples of cellular components include organelles, membranes, as for example noted above, and others.

[0106] It will be understood that the use of biomarkers that have different biological attributes or domains provides further information than if the biomarkers were related to the same or common biological attributes or domains. In this regard, it will be appreciated if the at least two biomarkers are highly correlated to each other, the use of both biomarkers would add little diagnostic/prognostic improvement compared to the use of a single one of the biomarkers. Accordingly, an indicator-determining method of the present invention in which a plurality of biomarkers and biomarker values are used preferably employ biomarkers that are not well correlated with each other, thereby ensuring that the inclusion of each biomarker in the method adds significantly to the discriminative ability of the indicator.

[0107] Despite this, in order to ensure that the indicator can accurately be used in performing the discrimination between at least two conditions (e.g., HVaSIRS and healthy condition) or the diagnosis of the presence, absence or degree of HVaSIRS or the provision of a prognosis for the HVaSIRS, the indicator has a performance value that is greater than or equal to a performance threshold. The performance threshold may be of any suitable form but is to be typically indicative of an explained variance of at least 0.3, or an equivalent value of another performance measure.

[0108] Suitably, a combination of biomarkers is employed, which biomarkers have a mutual correlation between ±0.9 and which combination provides an explained variance of at least 0.3. This typically allows an indicator to be defined that is suitable for ensuring that an accurate discrimination, diagnosis or prognosis can be obtained whilst minimizing the number of biomarkers that are required. Typically, the mutual correlation range is one of ±0.8; ±0.7; ±0.6; ±0.5; ±0.4; ±0.3; ±0.2; and, ±0.1. Typically, each HVaSIRS biomarker has a condition correlation with the presence, absence or degree of HVaSIRS, or with a prognosis for a HVaSIRS that lies outside a condition correlation range, the condition correlation range being between ±0.3 and more typically ±0.9; ±0.8; ±0.7; ±0.6; ±0.5; and, ±0.4. Typically, the performance threshold is indicative of an explained variance of at least one of 0.4; 0.5; 0.6; 0.7; 0.8; and 0.9.

[0109] It will be understood that in this context, the biomarkers used within the above-described method can define a biomarker profile for a HVaSIRS, which includes a minimal number of biomarkers, whilst maintaining sufficient performance to allow the biomarker profile to be used in making a clinically relevant diagnosis, prognosis, or differentiation. Minimizing the number of biomarkers used minimizes the costs associated with performing diagnostic or prognostic tests and in the case of nucleic acid expression products, allows the test to be performed utilizing relatively straightforward techniques such as nucleic acid array, and polymerase chain reaction (PCR) processes, or the like, allowing the test to be performed rapidly in a clinical environment.

[0110] Furthermore, producing a single indicator value allows the results of the test to be easily interpreted by a clinician or other medical practitioner, so that test can be used for reliable diagnosis in a clinical environment.

[0111] Processes for generating suitable biomarker profiles are described for example in WO 2015/117204, which uses the term “biomarker signature” in place of “biomarker profile” as defined herein. It will be understood, therefore, that terms “biomarker profile” and “biomarker signature” are equivalent in scope. The biomarker profile-generating processes disclosed in WO 2015/117204 provide mechanisms for selecting a combination of biomarkers, and more typically derived biomarkers, that can be used to form a biomarker profile, which in turn can be used in diagnosing the presence, absence or degree of HVaSIRS or in providing a prognosis for a HVaSIRS. In this regard, the biomarker profile defines the biomarkers that should be measured (i.e., the profile biomarkers), how derived biomarker values should be determined for measured biomarker values, and then how biomarker values should be subsequently combined to generate an indicator value. The biomarker profile can also specify defined indicator value ranges that indicate a particular presence, absence or degree of HVaSIRS or that provide a prognosis for a HVaSIRS.

[0112] Using the above-described methods a number of biomarkers have been identified that are particularly useful for assessing a likelihood that a subject has a presence, absence or degree of HVaSIRS or for providing a prognosis for a HVaSIRS in a subject. These biomarkers are referred to herein as “HVaSIRS biomarkers”. As used herein, the term “HVaSIRS biomarker” refers to a biomarker of the host, generally a biomarker of the host's immune system, which is altered, or whose level of expression is altered, as part of an inflammatory response to damage or insult resulting from a herpesvirus infection. The HVaSIRS biomarkers are suitably expression products of genes (also referred to interchangeably herein as “HVaSIRS biomarker genes”), including polynucleotide and polypeptide expression products. As used herein, polynucleotide expression products of HVaSIRS biomarker genes are referred to herein as “HVaSIRS biomarker polynucleotides.” Polypeptide expression products of the HVaSIRS biomarker genes are referred to herein as “HVaSIRS biomarker polypeptides.”

[0113] HVaSIRS biomarker are suitably selected from expression products of any one or more of the following HVaSIRS genes: ACAT1, ACSL1, ADCY3, ADCY7, ADRB2, ADSL, AKAP11, ALDOC, ARHGEF18, ARNTL, ARSB, ATP2B4, BACH2, BCL11A, BNIP3, BTG1, BTG3, C1QB, C6orf48, CAMK1D, CASP4, CASZ1, CCL5, CCR7, CD300A, CD37, CD79A, CD79B, CD8A, CD93, CHST12, COL17A1, COX4I1, CRY2, CST7, CYB561, CYLD, DGKA, DHRS3, DNPEP, DPEP2, EEF1G, EHD1, EIF2AK2, EIF2S3, EIF4B, EPHX2, ETS1, FAM129A, FDFT1, FLNB, FLT3LG, GALNT10, GDPD5, GFI1, GNG7, GPR162, GPR56, GRWD1, GZMA, HERC5, HERC6, HIC2, HSD17B8, ICAM2, IFI16, IFI44, IFITM1, IKBKG, IL4R, ITM2C, ITPKB, KIF13B, KPNB1, LAMA5, LBH, LDLR, LDLRAP1, LEF1, LRMP, LSM7, LTBP3, MAL, MED25, MLLT11, MRPS18B, MZF1, NAALADL1, NACA, NAP1L1, NECAP2, NET1, NGFRAP1, NKG7, NOSIP, OASL, PABPC4, PARP3, PEX11B, PFKL, PFKP, PHB2, PIK3IP1, PLEKHB1, POP5, PPP2R2B, PRDM1, PRKD2, PTOV1, PXN, RAB3GAP1, RABGAP1L, RALA, RARRES3, RBM17, RBM4B, REC8, RPAIN, RPL1OA, RPL11, RPL12, RPL15, RPL22, RPL27, RPL30, RPL36, RPL38, RPL8, RPS11, RPS5, RPS9, RUNX3, SAC3D1, SATB1, SERBP1, SERPINE2, SERTAD2, SLAMF7, SLC5A6, SPINT2, SQRDL, SREBF1, SRM, SVIL, SYNE2, SYPL1, SYT11, TANK, TAP1, TBC1D4, TBK1, TCF4, TCL1A, TDRD7, TGFBR3, TMC6, TMEM134, TMEM39B, TMUB2, TOP2B, TPK1, TPST2, TRAF3IP3, TXN, UBE2D2, UBE2L6, UBR2, VASH1, VPREB3, VPS35, WDR61, XPC, ZBP1 and ZW10. Non-limiting examples of nucleotide sequences for these HVaSIRS biomarkers are listed in SEQ ID NOs: 1-174. Non-limiting examples of amino acid sequences for these HVaSIRS biomarkers are listed in SEQ ID NOs: 175-348.

[0114] The present inventors have determined that HVaSIRS biomarkers have strong diagnostic performance when combined with one or more other HVaSIRS biomarkers. In advantageous embodiments, pairs of HVaSIRS biomarkers have been identified that can be used to determine the indicator. Accordingly, in representative examples of this type, an indicator is determined that correlates to a ratio of HVaSIRS biomarkers, which can be used in assessing a likelihood of a subject having a presence, absence or degree of HVaSIRS, or in providing a prognosis for a subject with HVaSIRS.

[0115] In these examples, the indicator-determining methods suitably include determining a pair of biomarker values, wherein each biomarker value is a value measured or derived for at least one corresponding HVaSIRS biomarker of the subject and is at least partially indicative of a concentration of the HVaSIRS biomarker in a sample taken from the subject. The biomarker values are typically used to determine a derived biomarker value using the pair of biomarker values, wherein the derived biomarker value is indicative of a ratio of concentrations of the pair of HVaSIRS biomarkers. Thus, if the biomarker values denote the concentrations of the HVaSIRS biomarkers, then the derived biomarker value will be based on a ratio of the biomarker values. However, if the biomarker values are related to the concentrations of the biomarkers, for example if they are logarithmically related by virtue of the biomarker values being based on PCR cycle times, or the like, then the biomarker values may be combined in some other manner, such as by subtracting the cycle times to determine a derived biomarker value indicative of a ratio of the concentrations of the HVaSIRS biomarkers.

[0116] The derived biomarker value is then used to determine the indicator, either by using the derived biomarker value as an indicator value, or by performing additional processing, such as comparing the derived biomarker value to a reference or the like, as will be described in more detail below.

[0117] In some embodiments in which pairs of HVaSIRS biomarkers are used to determine a derived biomarker value, one biomarker of a biomarker pair is selected from Group A HVaSIRS biomarkers and the other is selected from Group B HVaSIRS biomarkers, wherein an individual Group A HVaSIRS biomarker is an expression product of a gene selected from the group consisting of: GZMA, TGFBR3, CD8A, PABPC4, CHST12, NKG7, SYT11, RARRES3, RPL12, KIF13B, ICAM2, ADRB2, MRPS18B, RPL8, RPS11, SLAMF7, PRKD2, FDFT1, ATP2B4, RPL38, BTG1, DNPEP, NAP1L1, RABGAP1L and ACAT1, and wherein an individual Group B HVaSIRS biomarker is an expression product of a gene selected from the group consisting of: EPHX2, CCR7, MAL, LEF1, TRAF3IP3, PIK3IP1, ITM2C, LDLRAP1, NOSIP, ARHGEF18, SATB1, ITPKB, TBC1D4, FLT3LG, DHRS3, RBM4B, HSD17B8, MLLT11, TMC6, PLEKHB1, ALDOC, RPL22, EEF1G, TOP2B, BACH2, BNIP3, ADSL, GRWD1, RPL1OA, TMEM134, ETS1, CRY2, SERBP1, RPS5, ZW10, EIF4B, PEX11B, PHB2, SERPINE2, SRM, LSM7, RPL15, RBM17, DGKA, PTOV1, HIC2, NET1, XPC, SLC5A6, SERTAD2, TMEM39B, RPL27, RPL11, C6orf48, WDR61, PFKP, EIF2S3, NECAP2, RPL30, NACA, NGFRAP1, RPS9, RALA, COX4I1, UBE2D2 and VPS35.

[0118] In other embodiments in which pairs of HVaSIRS biomarkers are used to determine a derived biomarker value, one biomarker of a biomarker pair is selected from Group C HVaSIRS biomarkers and the other is selected from Group D HVaSIRS biomarkers, wherein an individual Group C HVaSIRS biomarker is an expression product of a gene selected from the group consisting of: RUNX3, GPR56, LBH, POP5, SYNE2, TPST2, RPL36, GALNT10, GFI1, MZF1, SREBF1, AKAP11, CAMK1D, CYB561, BTG3, CST7, SVIL, EIF2AK2, ARNTL, ZBP1, ADCY7, SYPL1 and HERC6, and wherein an individual Group D HVaSIRS biomarker is an expression product of a gene selected from the group consisting of: CD79B, CD79A, VPREB3, TCL1A, LAMA5, BCL11A, TCF4, DPEP2, RPAIN, RAB3GAP1, MED25 and LRMP.

[0119] In other embodiments in which pairs of HVaSIRS biomarkers are used to determine a derived biomarker value, one biomarker of a biomarker pair is selected from Group E HVaSIRS biomarkers and the other is selected from Group F HVaSIRS biomarkers, wherein an individual Group E HVaSIRS biomarker is an expression product of a gene selected from the group consisting of: TMUB2, ARSB, C1QB, PFKL, EHD1, PRDM1, IKBKG, TAP1, TANK, PARP3, OASL, ADCY3, FAM129A, SQRDL, UBR2, IFITM1, CYLD, ACSL1, PXN, UBE2L6, IL4R, COL17A1, TXN, CD300A, LDLR, TBK1, HERC5, TDRD7, KPNB1, IFI44, CASP4 and IFI16, and wherein an individual Group F HVaSIRS biomarker is an expression product of a gene selected from the group consisting of: GPR162, NAALADL1, LTBP3, REC8, CD37, TPK1, GDPD5, SAC3D1, SPINT2 and CD93.

[0120] In specific embodiments, the indicator-determining methods involve determining a first derived biomarker value using a first pair of biomarker values, the first derived biomarker value being indicative of a ratio of concentrations of first and second HVaSIRS biomarkers, determining a second derived biomarker value using a second pair of biomarker values, the second derived biomarker value being indicative of a ratio of concentrations of third and fourth HVaSIRS biomarkers, determining a third derived biomarker value using a third pair of biomarker values, the third derived biomarker value being indicative of a ratio of concentrations of fifth and sixth HVaSIRS biomarkers and determining the indicator by combining the first, second and third derived biomarker values. Thus, in these embodiments, three pairs of derived biomarker values can be used, which can assist in increasing the ability of the indicator to reliably determine the likelihood of a subject having or not having HVaSIRS.

[0121] The derived biomarker values could be combined using a combining function such as an additive model; a linear model; a support vector machine; a neural network model; a tree-learning method (e.g., random forest model); a regression model; a genetic algorithm; an annealing algorithm; a weighted sum; a nearest neighbor model; an ensemble method (e.g., bagging, boosting weighted averaging); and a probabilistic model. In some embodiments, biomarker values are measured or derived for a Group A HVaSIRS biomarker and for a Group B HVaSIRS biomarker, and the indicator is determined by combining the biomarker values. In some embodiments, biomarker values are measured or derived for a Group C HVaSIRS biomarker and for a Group D HVaSIRS biomarker, and the indicator is determined by combining the biomarker values. In some embodiments, biomarker values are measured or derived for a Group E HVaSIRS biomarker and for a Group F HVaSIRS biomarker, and the indicator is determined by combining the biomarker values. In still other embodiments, biomarker values are measured or derived for a Group A HVaSIRS biomarker, for a Group B HVaSIRS biomarker, for a Group C HVaSIRS biomarker and for a Group D HVaSIRS biomarker, and the indicator is determined by combining the biomarker values. In still other embodiments, biomarker values are measured or derived for a Group A HVaSIRS biomarker, for a Group B HVaSIRS biomarker, for a Group C HVaSIRS biomarker, for a Group D HVaSIRS biomarker, for a Group E HVaSIRS biomarker and for a Group F HVaSIRS biomarker and the indicator is determined by combining the biomarker values.

[0122] In some embodiments, the indicator is compared to an indicator reference, with a likelihood being determined in accordance with results of the comparison. The indicator reference may be derived from indicators determined for a number of individuals in a reference population. The reference population typically includes individuals having different characteristics, such as a plurality of individuals of different sexes; and/or ethnicities, with different groups being defined based on different characteristics, with the subject's indicator being compared to indicator references derived from individuals with similar characteristics. The reference population can also include a plurality of healthy individuals, a plurality of individuals suffering from HVaSIRS, a plurality of individuals suffering from a SIRS other than HVaSIRS (e.g., ADaSIRS, CaSIRS, TaSIRS and nHVVaSIRS), a plurality of individuals showing clinical signs of HVaSIRS, a plurality of individuals showing clinical signs of a SIRS other than HVaSIRS (e.g., e.g., ADaSIRS, CaSIRS, TaSIRS and nHVVaSIRS), and/or first and second groups of individuals, each group of individuals suffering from a respective diagnosed SIRS.

[0123] The indicator can also be used for determining a likelihood of the subject having a first or second condition, wherein the first condition is HVaSIRS and the second condition is a healthy condition or another SIRS (e.g., ADaSIRS, CaSIRS, TaSIRS and nHVVaSIRS); in other words, to distinguish between these conditions. In this case, this would typically be achieved by comparing the indicator to first and second indicator references, the first and second indicator references being indicative of first and second conditions and determining the likelihood in accordance with the results of the comparison. In particular, this can include determining first and second indicator probabilities using the results of the comparisons and combining the first and second indicator probabilities, for example using a Bayes method, to determine a condition probability corresponding to the likelihood of the subject having one of the conditions. In this situation the first and second conditions could include HVaSIRS and another SIRS conditions, or HVaSIRS and a healthy condition. In this case, the first and second indicator references are distributions of indicators determined for first and second groups of a reference population, the first and second group consisting of individuals diagnosed with the first or second condition respectively.

[0124] In specific embodiments, the indicator-determining methods of the present invention are performed using at least one electronic processing device, such as a suitably programmed computer system or the like. In this case, the electronic processing device typically obtains at least three pairs of measured biomarker values, either by receiving these from a measuring or other quantifying device, or by retrieving these from a database or the like. The processing device then determines a first derived biomarker value indicative of a ratio of concentrations of first and second immune system biomarkers, a second derived biomarker value indicative of a ratio of third and fourth immune system biomarkers, and a third derived biomarker value indicative of a ratio of fifth and sixth immune system biomarkers. The processing device then determines the indicator by combining the first, second and third derived biomarker values.

[0125] The processing device can then generate a representation of the indicator, for example by generating an alphanumeric indication of the indicator, a graphical indication of a comparison of the indicator to one or more indicator references or an alphanumeric indication of a likelihood of the subject having at least one medical condition.

[0126] The indicator-determining methods of the present invention typically include obtaining a sample from a subject, who typically has at least one clinical sign of SIRS, wherein the sample includes one or more HVaSIRS biomarkers (e.g., polynucleotide or polypeptide expression products of HVaSIRS genes) and quantifying at least two (e.g., 2, 3, 4, 5, 6, 7, 8, 9, 10 or more) of the HVaSIRS biomarkers within the sample to determine biomarker values. This can be achieved using any suitable technique, and will depend on the nature of the HVaSIRS biomarkers. Suitably, an individual measured or derived HVaSIRS biomarker value corresponds to the level, abundance or amount of a respective HVaSIRS biomarker or to a function that is applied to that level or amount. As used herein the terms “level”, “abundance” and “amount” are used interchangeably herein to refer to a quantitative amount (e.g., weight or moles), a semi-quantitative amount, a relative amount (e.g., weight % or mole % within class), a concentration, and the like. Thus, these terms encompass absolute or relative amounts or concentrations of HVaSIRS biomarkers in a sample. For example, if the indicator in some embodiments of the indicator-determining method of the present invention, which uses a plurality of HVaSIRS biomarkers, is based on a ratio of concentrations of the polynucleotide expression products, this process would typically include quantifying polynucleotide expression products by amplifying at least some polynucleotide expression products in the sample, determining an amplification amount representing a degree of amplification required to obtain a defined level of each of a pair of polynucleotide expression products and determining the indicator by determining a difference between the amplification amounts. In this regard, the amplification amount is generally a cycle time, a number of cycles, a cycle threshold and an amplification time. In this case, the method includes determining a first derived biomarker value by determining a difference between the amplification amounts of a first pair of polynucleotide expression products, determining a second derived biomarker value by determining a difference between the amplification amounts of a second pair of polynucleotide expression products, determining a third derived biomarker value by determining a difference between the amplification amounts of a third pair of polynucleotide expression products and determining the indicator by adding the first, second and third derived biomarker values.

[0127] In some embodiments, the presence, absence or degree of HVaSIRS or prognosis for a HVaSIRS in a subject is established by determining two or more HVaSIRS biomarker values, wherein a HVaSIRS biomarker value is indicative of a value derived for HVaSIRS biomarkers in a subject or in a sample taken from the subject. These biomarkers are referred to herein as “sample HVaSIRS biomarkers”. In accordance with the present invention, a sample HVaSIRS biomarker corresponds to a reference HVaSIRS biomarker (also referred to herein as a “corresponding HVaSIRS biomarker”). By “corresponding HVaSIRS biomarker” is meant a HVaSIRS biomarker that is structurally and/or functionally similar to a reference HVaSIRS biomarker as set forth for example in SEQ ID NOs: 1-348. Representative corresponding HVaSIRS biomarkers include expression products of allelic variants (same locus), homologues (different locus), and orthologues (different organism) of reference HVaSIRS biomarker genes. Nucleic acid variants of reference HVaSIRS biomarker genes and encoded HVaSIRS biomarker polynucleotide expression products can contain nucleotide substitutions, deletions, inversions and/or insertions. Variation can occur in either or both the coding and non-coding regions. The variations can produce both conservative and non-conservative amino acid substitutions (as compared in the encoded product). For nucleotide sequences, conservative variants include those sequences that, because of the degeneracy of the genetic code, encode the amino acid sequence of a reference HVaSIRS polypeptide.

[0128] Generally, variants of a particular HVaSIRS biomarker gene or polynucleotide will have at least about 40%, 45%, 50%, 51%, 52%, 53%, 54%, 55%, 56%, 57%, 58%, 59% 60%, 61%, 62%, 63%, 64%, 65%, 66%, 67%, 68%, 69% 70%, 71%, 72%, 73%, 74%, 75%, 76%, 77%, 78%, 79%, 80%, 81%, 82%, 83%, 84%, 85%, 86%, 87%, 88%, 89%, 90%, 91%, 92%, 93%, 94%, 95%, 96%, 97%, 98%, 99% or more sequence identity to that particular nucleotide sequence as determined by sequence alignment programs known in the art using default parameters. In some embodiments, the HVaSIRS biomarker gene or polynucleotide displays at least about 40%, 45%, 50%, 51%, 52%, 53%, 54%, 55%, 56%, 57%, 58%, 59% 60%, 61%, 62%, 63%, 64%, 65%, 66%, 67%, 68%, 69% 70%, 71%, 72%, 73%, 74%, 75%, 76%, 77%, 78%, 79%, 80%, 81%, 82%, 83%, 84%, 85%, 86%, 87%, 88%, 89%, 90%, 91%, 92%, 93%, 94%, 95%, 96%, 97%, 98%, 99% or more sequence identity to a nucleotide sequence selected from any one of SEQ ID NO: 1-174, as summarized in Table 11.

[0129] Corresponding HVaSIRS biomarkers also include amino acid sequences that display substantial sequence similarity or identity to the amino acid sequence of a reference HVaSIRS biomarker polypeptide. In general, an amino acid sequence that corresponds to a reference amino acid sequence will display at least about 50, 51, 52, 53, 54, 55, 56, 57, 58, 59, 60, 61, 62, 63, 64, 65, 66, 67, 68, 69, 70, 71, 72, 73, 74, 75, 76, 77, 78, 79, 80, 81, 82, 83, 84, 85, 86, 97, 88, 89, 90, 91, 92, 93, 94, 95, 96, 97, 98, 99% or even up to 100% sequence similarity or identity to a reference amino acid sequence selected from any one of SEQ ID NO: 175-348, as summarized in Table 12.

[0130] In some embodiments, calculations of sequence similarity or sequence identity between sequences are performed as follows:

[0131] To determine the percentage identity of two amino acid sequences, or of two nucleic acid sequences, the sequences are aligned for optimal comparison purposes (e.g., gaps can be introduced in one or both of a first and a second amino acid or nucleic acid sequence for optimal alignment and non-homologous sequences can be disregarded for comparison purposes). In some embodiments, the length of a reference sequence aligned for comparison purposes is at least 30%, usually at least 40%, more usually at least 50%, 60%, and even more usually at least 70%, 80%, 90%, 100% of the length of the reference sequence. The amino acid residues or nucleotides at corresponding amino acid positions or nucleotide positions are then compared. When a position in the first sequence is occupied by the same amino acid residue or nucleotide at the corresponding position in the second sequence, then the molecules are identical at that position. For amino acid sequence comparison, when a position in the first sequence is occupied by the same or similar amino acid residue (i.e., conservative substitution) at the corresponding position in the second sequence, then the molecules are similar at that position.

[0132] The percentage identity between the two sequences is a function of the number of identical amino acid residues shared by the sequences at individual positions, taking into account the number of gaps, and the length of each gap, which need to be introduced for optimal alignment of the two sequences. By contrast, the percentage similarity between the two sequences is a function of the number of identical and similar amino acid residues shared by the sequences at individual positions, taking into account the number of gaps, and the length of each gap, which need to be introduced for optimal alignment of the two sequences.

[0133] The comparison of sequences and determination of percentage identity or percentage similarity between sequences can be accomplished using a mathematical algorithm. In certain embodiments, the percentage identity or similarity between amino acid sequences is determined using the Needleman and Wünsch, (1970, J. Mol. Biol. 48: 444-453) algorithm which has been incorporated into the GAP program in the GCG software package (available at http://www.gcg.com), using either a Blossum 62 matrix or a PAM250 matrix, and a gap weight of 16, 14, 12, 10, 8, 6, or 4 and a length weight of 1, 2, 3, 4, 5, or 6. In specific embodiments, the percent identity between nucleotide sequences is determined using the GAP program in the GCG software package (available at http://www.gcg.com), using a NWSgapdna.CMP matrix and a gap weight of 40, 50, 60, 70, or 80 and a length weight of 1, 2, 3, 4, 5, or 6. An non-limiting set of parameters (and the one that should be used unless otherwise specified) includes a Blossum 62 scoring matrix with a gap penalty of 12, a gap extend penalty of 4, and a frameshift gap penalty of 5.

[0134] In some embodiments, the percentage identity or similarity between amino acid or nucleotide sequences can be determined using the algorithm of E. Meyers and W. Miller (1989, Cabios, 4: 11-17) which has been incorporated into the ALIGN program (version 2.0), using a PAM120 weight residue table, a gap length penalty of 12 and a gap penalty of 4.

[0135] The nucleic acid and protein sequences described herein can be used as a “query sequence” to perform a search against public databases to, for example, identify other family members or related sequences. Such searches can be performed using the NBLAST and XBLAST programs (version 2.0) of Altschul, et al., (1990, J Mol Biol., 215: 403-10). BLAST nucleotide searches can be performed with the NBLAST program, score=100, wordlength=12 to obtain nucleotide sequences homologous to 53010 nucleic acid molecules of the invention. BLAST protein searches can be performed with the XBLAST program, score=50, wordlength=3 to obtain amino acid sequences homologous to protein molecules of the invention. To obtain gapped alignments for comparison purposes, Gapped BLAST can be utilized as described in Altschul et al., (1997, Nucleic Acids Res, 25: 3389-3402). When utilizing BLAST and Gapped BLAST programs, the default parameters of the respective programs (e.g., XBLAST and NBLAST) can be used.

[0136] Corresponding HVaSIRS biomarker polynucleotides also include nucleic acid sequences that hybridize to reference HVaSIRS biomarker polynucleotides, or to their complements, under stringency conditions described below. As used herein, the term “hybridizes under low stringency, medium stringency, high stringency, or very high stringency conditions” describes conditions for hybridization and washing. “Hybridization” is used herein to denote the pairing of complementary nucleotide sequences to produce a DNA-DNA hybrid or a DNA-RNA hybrid. Complementary base sequences are those sequences that are related by the base-pairing rules. In DNA, A pairs with T and C pairs with G. In RNA, U pairs with A and C pairs with G. In this regard, the terms “match” and “mismatch” as used herein refer to the hybridization potential of paired nucleotides in complementary nucleic acid strands. Matched nucleotides hybridize efficiently, such as the classical A-T and G-C base pair mentioned above. Mismatches are other combinations of nucleotides that do not hybridize efficiently.

[0137] Guidance for performing hybridization reactions can be found in Ausubel et al., (1998, supra), Sections 6.3.1-6.3.6. Aqueous and non-aqueous methods are described in that reference and either can be used. Reference herein to low stringency conditions include and encompass from at least about 1% v/v to at least about 15% v/v formamide and from at least about 1M to at least about 2M salt for hybridization at 42° C., and at least about 1M to at least about 2M salt for washing at 42° C. Low stringency conditions also may include 1% Bovine Serum Albumin (BSA), 1 mM EDTA, 0.5M NaHPO₄ (pH 7.2), 7% SDS for hybridization at 65° C., and (i) 2×SSC, 0.1% SDS; or (ii) 0.5% BSA, 1 mM EDTA, 40 mM NaHPO₄ (pH 7.2), 5% SDS for washing at room temperature. One embodiment of low stringency conditions includes hybridization in 6× sodium chloride/sodium citrate (SSC) at about 45° C., followed by two washes in 0.2×SSC, 0.1% SDS at least at 50° C. (the temperature of the washes can be increased to 55° C. for low stringency conditions). Medium stringency conditions include and encompass from at least about 16% v/v to at least about 30% v/v formamide and from at least about 0.5M to at least about 0.9M salt for hybridization at 42° C., and at least about 0.1M to at least about 0.2M salt for washing at 55° C. Medium stringency conditions also may include 1% Bovine Serum Albumin (BSA), 1 mM EDTA, 0.5M NaHPO₄ (pH 7.2), 7% SDS for hybridization at 65° C., and (i) 2×SSC, 0.1% SDS; or (ii) 0.5% BSA, 1 mM EDTA, 40 mM NaHPO₄ (pH 7.2), 5% SDS for washing at 60-65° C. One embodiment of medium stringency conditions includes hybridizing in 6×SSC at about 45° C., followed by one or more washes in 0.2×SSC, 0.1% SDS at 60° C. High stringency conditions include and encompass from at least about 31% v/v to at least about 50% v/v formamide and from about 0.01M to about 0.15M salt for hybridization at 42° C., and about 0.01M to about 0.02M salt for washing at 55° C. High stringency conditions also may include 1% BSA, 1 mM EDTA, 0.5M NaHPO₄ (pH 7.2), 7% SDS for hybridization at 65° C., and (i) 0.2×SSC, 0.1% SDS; or (ii) 0.5% BSA, 1 mM EDTA, 40 mM NaHPO₄ (pH 7.2), 1% SDS for washing at a temperature in excess of 65° C. One embodiment of high stringency conditions includes hybridizing in 6×SSC at about 45° C., followed by one or more washes in 0.2×SSC, 0.1% SDS at 65° C.

[0138] In certain embodiments, a corresponding HVaSIRS biomarker polynucleotide is one that hybridizes to a disclosed nucleotide sequence under very high stringency conditions. One embodiment of very high stringency conditions includes hybridizing 0.5M sodium phosphate, 7% SDS at 65° C., followed by one or more washes at 0.2×SSC, 1% SDS at 65° C.

[0139] Other stringency conditions are well known in the art and a skilled addressee will recognize that various factors can be manipulated to optimize the specificity of the hybridization. Optimization of the stringency of the final washes can serve to ensure a high degree of hybridization. For detailed examples, see Ausubel et al., supra at pages 2.10.1 to 2.10.16 and Sambrook et al. (1989, supra) at sections 1.101 to 1.104.

[0140] Generally, a sample is processed prior to HVaSIRS biomarker detection or quantification. For example, nucleic acid and/or proteins may be extracted, isolated, and/or purified from a sample prior to analysis. Various DNA, mRNA, and/or protein extraction techniques are well known to those skilled in the art. Processing may include centrifugation, ultracentrifugation, ethanol precipitation, filtration, fractionation, resuspension, dilution, concentration, etc. In some embodiments, methods and systems provide analysis (e.g., quantification of RNA or protein biomarkers) from raw sample (e.g., biological fluid such as blood, serum, etc.) without or with limited processing.

[0141] Methods may comprise steps of homogenizing a sample in a suitable buffer, removal of contaminants and/or assay inhibitors, adding a HVaSIRS biomarker capture reagent (e.g., a magnetic bead to which is linked an oligonucleotide complementary to a target HVaSIRS nucleic acid biomarker), incubated under conditions that promote the association (e.g., by hybridization) of the target biomarker with the capture reagent to produce a target biomarker:capture reagent complex, incubating the target biomarker:capture complex under target biomarker-release conditions. In some embodiments, multiple HVaSIRS biomarkers are isolated in each round of isolation by adding multiple HVaSIRS biomarkers capture reagents (e.g., specific to the desired biomarkers) to the solution. For example, multiple HVaSIRS biomarker capture reagents, each comprising an oligonucleotide specific for a different target HVaSIRS biomarker can be added to the sample for isolation of multiple HVaSIRS biomarker. It is contemplated that the methods encompass multiple experimental designs that vary both in the number of capture steps and in the number of target HVaSIRS biomarker captured in each capture step. In some embodiments, capture reagents are molecules, moieties, substances, or compositions that preferentially (e.g., specifically and selectively) interact with a particular biomarker sought to be isolated, purified, detected, and/or quantified. Any capture reagent having desired binding affinity and/or specificity to the particular HVaSIRS biomarker can be used in the present technology. For example, the capture reagent can be a macromolecule such as a peptide, a protein (e.g., an antibody or receptor), an oligonucleotide, a nucleic acid, (e.g., nucleic acids capable of hybridizing with the HVaSIRS biomarkers), vitamins, oligosaccharides, carbohydrates, lipids, or small molecules, or a complex thereof. As illustrative and non-limiting examples, an avidin target capture reagent may be used to isolate and purify targets comprising a biotin moiety, an antibody may be used to isolate and purify targets comprising the appropriate antigen or epitope, and an oligonucleotide may be used to isolate and purify a complementary oligonucleotide.

[0142] Any nucleic acids, including single-stranded and double-stranded nucleic acids, that are capable of binding, or specifically binding, to a target HVaSIRS biomarker can be used as the capture reagent. Examples of such nucleic acids include DNA, RNA, aptamers, peptide nucleic acids, and other modifications to the sugar, phosphate, or nucleoside base. Thus, there are many strategies for capturing a target and accordingly many types of capture reagents are known to those in the art.

[0143] In addition, HVaSIRS biomarker capture reagents may comprise a functionality to localize, concentrate, aggregate, etc. the capture reagent and thus provide a way to isolate and purify the target HVaSIRS biomarker when captured (e.g., bound, hybridized, etc.) to the capture reagent (e.g., when a target:capture reagent complex is formed). For example, in some embodiments the portion of the capture reagent that interacts with the HVaSIRS biomarker (e.g., an oligonucleotide) is linked to a solid support (e.g., a bead, surface, resin, column, and the like) that allows manipulation by the user on a macroscopic scale. Often, the solid support allows the use of a mechanical means to isolate and purify the target:capture reagent complex from a heterogeneous solution. For example, when linked to a bead, separation is achieved by removing the bead from the heterogeneous solution, e.g., by physical movement. In embodiments in which the bead is magnetic or paramagnetic, a magnetic field is used to achieve physical separation of the capture reagent (and thus the target HVaSIRS biomarker) from the heterogeneous solution.

[0144] The HVaSIRS biomarkers may be quantified or detected using any suitable technique. In specific embodiments, the HVaSIRS biomarkers are quantified using reagents that determine the level, abundance or amount of individual HVaSIRS biomarkers. Non-limiting reagents of this type include reagents for use in nucleic acid- and protein-based assays.

[0145] In illustrative nucleic acid-based assays, nucleic acid is isolated from cells contained in the biological sample according to standard methodologies (Sambrook, et al., 1989, supra; and Ausubel et al., 1994, supra). The nucleic acid is typically fractionated (e.g., poly A⁺ RNA) or whole cell RNA. Where RNA is used as the subject of detection, it may be desired to convert the RNA to a complementary DNA. In some embodiments, the nucleic acid is amplified by a template-dependent nucleic acid amplification technique. A number of template dependent processes are available to amplify the HVaSIRS biomarker sequences present in a given template sample. An exemplary nucleic acid amplification technique is the polymerase chain reaction (referred to as PCR), which is described in detail in U.S. Pat. Nos. 4,683,195, 4,683,202 and 4,800,159, Ausubel et al. (supra), and in Innis et al., (“PCR Protocols”, Academic Press, Inc., San Diego Calif., 1990). Briefly, in PCR, two primer sequences are prepared that are complementary to regions on opposite complementary strands of the biomarker sequence. An excess of deoxynucleotide triphosphates are added to a reaction mixture along with a DNA polymerase, e.g., Taq polymerase. If a cognate HVaSIRS biomarker sequence is present in a sample, the primers will bind to the biomarker and the polymerase will cause the primers to be extended along the biomarker sequence by adding on nucleotides. By raising and lowering the temperature of the reaction mixture, the extended primers will dissociate from the biomarker to form reaction products, excess primers will bind to the biomarker and to the reaction products and the process is repeated. A reverse transcriptase PCR amplification procedure may be performed in order to quantify the amount of mRNA amplified. Methods of reverse transcribing RNA into cDNA are well known and described in Sambrook et al., 1989, supra. Alternative methods for reverse transcription utilize thermostable, RNA-dependent DNA polymerases. These methods are described in WO 90/07641. Polymerase chain reaction methodologies are well known in the art. In specific embodiments in which whole cell RNA is used, cDNA synthesis using whole cell RNA as a sample produces whole cell cDNA.

[0146] In certain advantageous embodiments, the template-dependent amplification involves quantification of transcripts in real-time. For example, RNA or DNA may be quantified using the Real-Time PCR technique (Higuchi, 1992, et al., Biotechnology 10: 413-417). By determining the concentration of the amplified products of the target DNA in PCR reactions that have completed the same number of cycles and are in their linear ranges, it is possible to determine the relative concentrations of the specific target sequence in the original DNA mixture. If the DNA mixtures are cDNAs synthesized from RNAs isolated from different tissues or cells, the relative abundance of the specific mRNA from which the target sequence was derived can be determined for the respective tissues or cells. This direct proportionality between the concentration of the PCR products and the relative mRNA abundance is only true in the linear range of the PCR reaction. The final concentration of the target DNA in the plateau portion of the curve is determined by the availability of reagents in the reaction mix and is independent of the original concentration of target DNA. In specific embodiments, multiplexed, tandem PCR (MT-PCR) is employed, which uses a two-step process for gene expression profiling from small quantities of RNA or DNA, as described for example in US Pat. Appl. Pub. No. 20070190540. In the first step, RNA is converted into cDNA and amplified using multiplexed gene specific primers. In the second step each individual gene is quantitated by real time PCR.

[0147] In certain embodiments, target nucleic acids are quantified using blotting techniques, which are well known to those of skill in the art. Southern blotting involves the use of DNA as a target, whereas Northern blotting involves the use of RNA as a target. Each provides different types of information, although cDNA blotting is analogous, in many aspects, to blotting or RNA species. Briefly, a probe is used to target a DNA or RNA species that has been immobilized on a suitable matrix, often a filter of nitrocellulose. The different species should be spatially separated to facilitate analysis. This often is accomplished by gel electrophoresis of nucleic acid species followed by “blotting” on to the filter. Subsequently, the blotted target is incubated with a probe (usually labeled) under conditions that promote denaturation and rehybridization. Because the probe is designed to base pair with the target, the probe will bind a portion of the target sequence under renaturing conditions. Unbound probe is then removed, and detection is accomplished as described above. Following detection/quantification, one may compare the results seen in a given subject with a control reaction or a statistically significant reference group or population of control subjects as defined herein. In this way, it is possible to correlate the amount of HVaSIRS biomarker nucleic acid detected with the progression or severity of the disease.

[0148] Also contemplated are biochip-based technologies such as those described by Hacia et al. (1996, Nature Genetics 14: 441-447) and Shoemaker et al. (1996, Nature Genetics 14: 450-456). Briefly, these techniques involve quantitative methods for analyzing large numbers of genes rapidly and accurately. By tagging genes with oligonucleotides or using fixed nucleic acid probe arrays, one can employ biochip technology to segregate target molecules as high-density arrays and screen these molecules on the basis of hybridization. See also Pease et al. (1994, Proc. Natl. Acad. Sci. U.S.A. 91: 5022-5026); Fodor et al. (1991, Science 251: 767-773). Briefly, nucleic acid probes to HVaSIRS biomarker polynucleotides are made and attached to biochips to be used in screening and diagnostic methods, as outlined herein. The nucleic acid probes attached to the biochip are designed to be substantially complementary to specific expressed HVaSIRS biomarker nucleic acids, i.e., the target sequence (either the target sequence of the sample or to other probe sequences, for example in sandwich assays), such that hybridization of the target sequence and the probes of the present invention occur. This complementarity need not be perfect; there may be any number of base pair mismatches, which will interfere with hybridization between the target sequence and the nucleic acid probes of the present invention. However, if the number of mismatches is so great that no hybridization can occur under even the least stringent of hybridization conditions, the sequence is not a complementary target sequence. In certain embodiments, more than one probe per sequence is used, with either overlapping probes or probes to different sections of the target being used. That is, two, three, four or more probes, with three being desirable, are used to build in a redundancy for a particular target. The probes can be overlapping (i.e. have some sequence in common), or separate.

[0149] In an illustrative biochip analysis, oligonucleotide probes on the biochip are exposed to or contacted with a nucleic acid sample suspected of containing one or more HVaSIRS biomarker polynucleotides under conditions favoring specific hybridization. Sample extracts of DNA or RNA, either single or double-stranded, may be prepared from fluid suspensions of biological materials, or by grinding biological materials, or following a cell lysis step which includes, but is not limited to, lysis effected by treatment with SDS (or other detergents), osmotic shock, guanidinium isothiocyanate and lysozyme. Suitable DNA, which may be used in the method of the invention, includes cDNA. Such DNA may be prepared by any one of a number of commonly used protocols as for example described in Ausubel, et al., 1994, supra, and Sambrook, et al., 1989, supra.

[0150] Suitable RNA, which may be used in the method of the invention, includes messenger RNA, complementary RNA transcribed from DNA (cRNA) or genomic or subgenomic RNA. Such RNA may be prepared using standard protocols as for example described in the relevant sections of Ausubel, et al. 1994, supra and Sambrook, et al. 1989, supra).

[0151] cDNA may be fragmented, for example, by sonication or by treatment with restriction endonucleases. Suitably, cDNA is fragmented such that resultant DNA fragments are of a length greater than the length of the immobilized oligonucleotide probe(s) but small enough to allow rapid access thereto under suitable hybridization conditions. Alternatively, fragments of cDNA may be selected and amplified using a suitable nucleotide amplification technique, as described for example above, involving appropriate random or specific primers.

[0152] Usually the target HVaSIRS biomarker polynucleotides are detectably labeled so that their hybridization to individual probes can be determined. The target polynucleotides are typically detectably labeled with a reporter molecule illustrative examples of which include chromogens, catalysts, enzymes, fluorochromes, chemiluminescent molecules, bioluminescent molecules, lanthanide ions (e.g., Eu³⁴), a radioisotope and a direct visual label. In the case of a direct visual label, use may be made of a colloidal metallic or non-metallic particle, a dye particle, an enzyme or a substrate, an organic polymer, a latex particle, a liposome, or other vesicle containing a signal producing substance and the like. Illustrative labels of this type include large colloids, for example, metal colloids such as those from gold, selenium, silver, tin and titanium oxide. In some embodiments in which an enzyme is used as a direct visual label, biotinylated bases are incorporated into a target polynucleotide.

[0153] The hybrid-forming step can be performed under suitable conditions for hybridizing oligonucleotide probes to test nucleic acid including DNA or RNA. In this regard, reference may be made, for example, to NUCLEIC ACID HYBRIDIZATION, A PRACTICAL APPROACH (Homes and Higgins, eds.) (IRL press, Washington D.C., 1985). In general, whether hybridization takes place is influenced by the length of the oligonucleotide probe and the polynucleotide sequence under test, the pH, the temperature, the concentration of mono- and divalent cations, the proportion of G and C nucleotides in the hybrid-forming region, the viscosity of the medium and the possible presence of denaturants. Such variables also influence the time required for hybridization. The preferred conditions will therefore depend upon the particular application. Such empirical conditions, however, can be routinely determined without undue experimentation.

[0154] After the hybrid-forming step, the probes are washed to remove any unbound nucleic acid with a hybridization buffer. This washing step leaves only bound target polynucleotides. The probes are then examined to identify which probes have hybridized to a target polynucleotide.

[0155] The hybridization reactions are then detected to determine which of the probes has hybridized to a corresponding target sequence. Depending on the nature of the reporter molecule associated with a target polynucleotide, a signal may be instrumentally detected by irradiating a fluorescent label with light and detecting fluorescence in a fluorimeter; by providing for an enzyme system to produce a dye which could be detected using a spectrophotometer; or detection of a dye particle or a colored colloidal metallic or non-metallic particle using a reflectometer; in the case of using a radioactive label or chemiluminescent molecule employing a radiation counter or autoradiography. Accordingly, a detection means may be adapted to detect or scan light associated with the label which light may include fluorescent, luminescent, focused beam or laser light. In such a case, a charge couple device (CCD) or a photocell can be used to scan for emission of light from a probe:target polynucleotide hybrid from each location in the micro-array and record the data directly in a digital computer. In some cases, electronic detection of the signal may not be necessary. For example, with enzymatically generated color spots associated with nucleic acid array format, visual examination of the array will allow interpretation of the pattern on the array. In the case of a nucleic acid array, the detection means is suitably interfaced with pattern recognition software to convert the pattern of signals from the array into a plain language genetic profile. In certain embodiments, oligonucleotide probes specific for different HVaSIRS biomarker polynucleotides are in the form of a nucleic acid array and detection of a signal generated from a reporter molecule on the array is performed using a ‘chip reader’. A detection system that can be used by a ‘chip reader’ is described for example by Pirrung et al. (U.S. Pat. No. 5,143,854). The chip reader will typically also incorporate some signal processing to determine whether the signal at a particular array position or feature is a true positive or maybe a spurious signal. Exemplary chip readers are described for example by Fodor et al. (U.S. Pat. No. 5,925,525). Alternatively, when the array is made using a mixture of individually addressable kinds of labeled microbeads, the reaction may be detected using flow cytometry.

[0156] In certain embodiments, the HVaSIRS biomarker is a target RNA (e.g., mRNA) or a DNA copy of the target RNA whose level or abundance is measured using at least one nucleic acid probe that hybridizes under at least low, medium, or high stringency conditions to the target RNA or to the DNA copy, wherein the nucleic acid probe comprises at least 15 (e.g., 15, 16, 17, 18, 19, 20, 21, 22, 23, 24, 25, 26, 27, 28, 29, 30, or more) contiguous nucleotides of HVaSIRS biomarker polynucleotide. In some embodiments, the measured level or abundance of the target RNA or its DNA copy is normalized to the level or abundance of a reference RNA or a DNA copy of the reference RNA. Suitably, the nucleic acid probe is immobilized on a solid or semi-solid support. In illustrative examples of this type, the nucleic acid probe forms part of a spatial array of nucleic acid probes. In some embodiments, the level of nucleic acid probe that is bound to the target RNA or to the DNA copy is measured by hybridization (e.g., using a nucleic acid array). In other embodiments, the level of nucleic acid probe that is bound to the target RNA or to the DNA copy is measured by nucleic acid amplification (e.g., using a polymerase chain reaction (PCR)). In still other embodiments, the level of nucleic acid probe that is bound to the target RNA or to the DNA copy is measured by nuclease protection assay.

[0157] Sequencing technologies such as Sanger sequencing, pyrosequencing, sequencing by ligation, massively parallel sequencing, also called “Next-generation sequencing” (NGS), and other high-throughput sequencing approaches with or without sequence amplification of the target can also be used to detect or quantify the presence of HVaSIRS nucleic acid biomarker in a sample. Sequence-based methods can provide further information regarding alternative splicing and sequence variation in previously identified genes. Sequencing technologies include a number of steps that are grouped broadly as template preparation, sequencing, detection and data analysis. Current methods for template preparation involve randomly breaking genomic DNA into smaller sizes from which each fragment is immobilized to a support. The immobilization of spatially separated fragment allows thousands to billions of sequencing reaction to be performed simultaneously. A sequencing step may use any of a variety of methods that are commonly known in the art. One specific example of a sequencing step uses the addition of nucleotides to the complementary strand to provide the DNA sequence. The detection steps range from measuring bioluminescent signal of a synthesized fragment to four-color imaging of single molecule. In some embodiments in which NGS is used to detect or quantify the presence of HVaSIRS nucleic acid biomarker in a sample, the methods are suitably selected from semiconductor sequencing (Ion Torrent; Personal Genome Machine); Helicos True Single Molecule Sequencing (tSMS) (Harris et al. 2008, Science 320:106-109); 454 sequencing (Roche) (Margulies et al. 2005, Nature, 437, 376-380); SOLID technology (Applied Biosystems); SOLEXA sequencing (Illumina); single molecule, real-time (SMRT™) technology of Pacific Biosciences; nanopore sequencing (Soni and Meller, 2007. Clin Chem 53: 1996-2001); DNA nanoball sequencing; sequencing using technology from Dover Systems (Polonator), and technologies that do not require amplification or otherwise transform native DNA prior to sequencing (e.g., Pacific Biosciences and Helicos), such as nanopore-based strategies (e.g., Oxford Nanopore, Genia Technologies, and Nabsys).

[0158] In other embodiments, HVaSIRS biomarker protein levels are assayed using protein-based assays known in the art. For example, when HVaSIRS biomarker protein is an enzyme, the protein can be quantified based upon its catalytic activity or based upon the number of molecules of the protein contained in a sample. Antibody-based techniques may be employed including, for example, immunoassays, such as the enzyme-linked immunosorbent assay (ELISA) and the radioimmunoassay (RIA).

[0159] In specific embodiments, protein-capture arrays that permit simultaneous detection and/or quantification of a large number of proteins are employed. For example, low-density protein arrays on filter membranes, such as the universal protein array system (Ge, 2000 Nucleic Acids Res. 28(2):e3) allow imaging of arrayed antigens using standard ELISA techniques and a scanning charge-coupled device (CCD) detector. Immuno-sensor arrays have also been developed that enable the simultaneous detection of clinical analytes. It is now possible using protein arrays, to profile protein expression in bodily fluids, such as in sera of healthy or diseased subjects, as well as in subjects pre- and post-drug treatment.

[0160] Exemplary protein capture arrays include arrays comprising spatially addressed antigen-binding molecules, commonly referred to as antibody arrays, which can facilitate extensive parallel analysis of numerous proteins defining a proteome or subproteome. Antibody arrays have been shown to have the required properties of specificity and acceptable background, and some are available commercially (e.g., BD Biosciences, Clontech, Bio-Rad and Sigma). Various methods for the preparation of antibody arrays have been reported (see, e.g., Lopez et al., 2003 J. Chromatogram. B 787:19-27; Cahill, 2000 Trends in Biotechnology 7:47-51; U.S. Pat. App. Pub. 2002/0055186; U.S. Pat. App. Pub. 2003/0003599; PCT publication WO 03/062444; PCT publication WO 03/077851; PCT publication WO 02/59601; PCT publication WO 02/39120; PCT publication WO 01/79849; PCT publication WO 99/39210). The antigen-binding molecules of such arrays may recognize at least a subset of proteins expressed by a cell or population of cells, illustrative examples of which include growth factor receptors, hormone receptors, neurotransmitter receptors, catecholamine receptors, amino acid derivative receptors, cytokine receptors, extracellular matrix receptors, antibodies, lectins, cytokines, serpins, proteases, kinases, phosphatases, ras-like GTPases, hydrolases, steroid hormone receptors, transcription factors, heat-shock transcription factors, DNA-binding proteins, zinc-finger proteins, leucine-zipper proteins, homeodomain proteins, intracellular signal transduction modulators and effectors, apoptosis-related factors, DNA synthesis factors, DNA repair factors, DNA recombination factors and cell-surface antigens.

[0161] Individual spatially distinct protein-capture agents are typically attached to a support surface, which is generally planar or contoured. Common physical supports include glass slides, silicon, microwells, nitrocellulose or PVDF membranes, and magnetic and other microbeads.

[0162] Particles in suspension can also be used as the basis of arrays, providing they are coded for identification; systems include color coding for microbeads (e.g., available from Luminex, Bio-Rad and Nanomics Biosystems) and semiconductor nanocrystals (e.g., QDots™, available from Quantum Dots), and barcoding for beads (UltraPlex™, available from Smartbeads) and multimetal microrods (Nanobarcodes™ particles, available from Surromed). Beads can also be assembled into planar arrays on semiconductor chips (e.g., available from LEAPS technology and BioArray Solutions). Where particles are used, individual protein-capture agents are typically attached to an individual particle to provide the spatial definition or separation of the array. The particles may then be assayed separately, but in parallel, in a compartmentalized way, for example in the wells of a microtiter plate or in separate test tubes.

[0163] In operation, a protein sample, which is optionally fragmented to form peptide fragments (see, e.g., U.S. Pat. App. Pub. 2002/0055186), is delivered to a protein-capture array under conditions suitable for protein or peptide binding, and the array is washed to remove unbound or non-specifically bound components of the sample from the array. Next, the presence or amount of protein or peptide bound to each feature of the array is detected using a suitable detection system. The amount of protein bound to a feature of the array may be determined relative to the amount of a second protein bound to a second feature of the array. In certain embodiments, the amount of the second protein in the sample is already known or known to be invariant.

[0164] In specific embodiments, the HVaSIRS biomarker is a target polypeptide whose level is measured using at least one antigen-binding molecule that is immuno-interactive with the target polypeptide. In these embodiments, the measured level of the target polypeptide is normalized to the level of a reference polypeptide. Suitably, the antigen-binding molecule is immobilized on a solid or semi-solid support. In illustrative examples of this type, the antigen-binding molecule forms part of a spatial array of antigen-binding molecule. In some embodiments, the level of antigen-binding molecule that is bound to the target polypeptide is measured by immunoassay (e.g., using an ELISA).

[0165] All the essential reagents required for detecting and quantifying the HVaSIRS biomarkers of the invention may be assembled together in a kit. In some embodiments, the kit comprises a reagent that permits quantification of at least one HVaSIRS biomarker. In some embodiments the kit comprises: (i) a reagent that allows quantification (e.g., determining the level or abundance) of a first HVaSIRS biomarker; and (ii) a reagent that allows quantification (e.g., determining the level or abundance) of a second HVaSIRS biomarker, wherein the first and second biomarkers have a mutual correlation in respect of HVaSIRS that lies within a mutual correlation range of between ±0.9, and wherein a combination of respective biomarker values for the first and second HVaSIRS biomarkers that are measured for or derived from a subject has a performance value greater than or equal to a performance threshold representing the ability of the combination of the first and second HVaSIRS biomarkers to diagnose the presence, absence or degree of the at least one condition, or to provide a prognosis for the at least one condition, the performance threshold being a variance explained of at least 0.3. In some embodiments, the kit further comprises (iii) a reagent that allows quantification (e.g., determining the level or abundance) of a third HVaSIRS biomarker; and (iv) a reagent that allows quantification (e.g., determining the level or abundance) of a fourth HVaSIRS biomarker, wherein the third and fourth HVaSIRS biomarkers have a mutual correlation in respect of HVaSIRS that lies within a mutual correlation range of between ±0.9, and wherein a combination of respective biomarker values for the third and fourth HVaSIRS biomarkers that are measured for or derived from a subject has a performance value greater than or equal to a performance threshold representing the ability of the combination of the third and fourth HVaSIRS biomarkers to diagnose the presence, absence or degree of HVaSIRS, or to provide a prognosis for a HVaSIRS, the performance threshold being a variance explained of at least 0.3. In some embodiments, the kit further comprises (v) a reagent that allows quantification (e.g., determining the level or abundance) of a fifth HVaSIRS biomarker; and (vi) a reagent that allows quantification (e.g., determining the level or abundance) of a sixth HVaSIRS biomarker, wherein the fifth and sixth HVaSIRS biomarkers have a mutual correlation in respect of HVaSIRS that lies within a mutual correlation range of between ±0.9, and wherein a combination of respective biomarker values for the fifth and sixth HVaSIRS biomarkers that are measured for or derived from a subject has a performance value greater than or equal to a performance threshold representing the ability of the combination of the fifth and sixth HVaSIRS biomarkers to diagnose the presence, absence or degree of HVaSIRS, or to provide a prognosis for a HVaSIRS, the performance threshold being a variance explained of at least 0.3.

[0166] In the context of the present invention, “kit” is understood to mean a product containing the different reagents necessary for carrying out the methods of the invention packed so as to allow their transport and storage. Materials suitable for packing the components of the kit include crystal, plastic (polyethylene, polypropylene, polycarbonate and the like), bottles, vials, paper, envelopes and the like. Additionally, the kits of the invention can contain instructions for the simultaneous, sequential or separate use of the different components contained in the kit. The instructions can be in the form of printed material or in the form of an electronic support capable of storing instructions such that they can be read by a subject, such as electronic storage media (magnetic disks, tapes and the like), optical media (CD-ROM, DVD) and the like. Alternatively, or in addition, the media can contain Internet addresses that provide the instructions.

[0167] Reagents that allow quantification of a HVaSIRS biomarker include compounds or materials, or sets of compounds or materials, which allow quantification of the HVaSIRS biomarker. In specific embodiments, the compounds, materials or sets of compounds or materials permit determining the expression level of a gene (e.g., HVaSIRS biomarker gene), including without limitation the extraction of RNA material, the determination of the level of a corresponding RNA, etc., primers for the synthesis of a corresponding cDNA, primers for amplification of DNA, and/or probes capable of specifically hybridizing with the RNAs (or the corresponding cDNAs) encoded by the genes, TaqMan probes, etc.

[0168] The kits may also optionally include appropriate reagents for detection of labels, positive and negative controls, washing solutions, blotting membranes, microtiter plates, dilution buffers and the like. For example, a nucleic acid-based detection kit may include (i) a HVaSIRS biomarker polynucleotide (which may be used as a positive control), (ii) a primer or probe that specifically hybridizes to a HVaSIRS biomarker polynucleotide. Also included may be enzymes suitable for amplifying nucleic acids including various polymerases (reverse transcriptase, Taq, Sequenase™, DNA ligase etc. depending on the nucleic acid amplification technique employed), deoxynucleotides and buffers to provide the necessary reaction mixture for amplification. Such kits also generally will comprise, in suitable means, distinct containers for each individual reagent and enzyme as well as for each primer or probe. Alternatively, a protein-based detection kit may include (i) a HVaSIRS biomarker polypeptide (which may be used as a positive control), (ii) an antibody that binds specifically to a HVaSIRS biomarker polypeptide. The kit can also feature various devices (e.g., one or more) and reagents (e.g., one or more) for performing one of the assays described herein; and/or printed instructions for using the kit to quantify the expression of a HVaSIRS biomarker gene.

[0169] The reagents described herein, which may be optionally associated with detectable labels, can be presented in the format of a microfluidics card, a chip or chamber, a microarray or a kit adapted for use with the assays described in the examples or below, e.g., RT-PCR or Q PCR techniques described herein.

[0170] The reagents also have utility in compositions for detecting and quantifying the biomarkers of the invention. For example, a reverse transcriptase may be used to reverse transcribe RNA transcripts, including mRNA, in a nucleic acid sample, to produce reverse transcribed transcripts, including reverse transcribed mRNA (also referred to as “cDNA”). In specific embodiments, the reverse transcribed mRNA is whole cell reverse transcribed mRNA (also referred to herein as “whole cell cDNA”). The nucleic acid sample is suitably derived from components of the immune system, representative examples of which include components of the innate and adaptive immune systems as broadly discussed for example above. In specific embodiments, the reverse transcribed RNA is derived blood cells (e.g., peripheral blood cells). Suitably, the reverse transcribed RNA is derived leukocytes.

[0171] The reagents are suitably used to quantify the reverse transcribed transcripts. For example, oligonucleotide primers that hybridize to the reverse transcribed transcript can be used to amplify at least a portion of the reverse transcribed transcript via a suitable nucleic acid amplification technique, e.g., RT-PCR or qPCR techniques described herein. Alternatively, oligonucleotide probes may be used to hybridize to the reverse transcribed transcript for the quantification, using a nucleic acid hybridization analysis technique (e.g., microarray analysis), as described for example above. Thus, in some embodiments, a respective oligonucleotide primer or probe is hybridized to a complementary nucleic acid sequence of a reverse transcribed transcript in the compositions of the invention. The compositions typically comprise labeled reagents for detecting and/or quantifying the reverse transcribed transcripts. Representative reagents of this type include labeled oligonucleotide primers or probes that hybridize to RNA transcripts or reverse transcribed RNA, labeled RNA, labeled reverse transcribed RNA as well as labeled oligonucleotide linkers or tags (e.g., a labeled RNA or DNA linker or tag) for labeling (e.g., end labeling such as 3′ end labeling) RNA or reverse transcribed RNA. The primers, probes, RNA or reverse transcribed RNA (i.e., cDNA) (whether labeled or non-labeled) may be immobilized or free in solution. Representative reagents of this type include labeled oligonucleotide primers or probes that hybridize to reverse transcribed and transcripts as well as labeled reverse transcribed transcripts. The label can be any reporter molecule as known in the art, illustrative examples of which are described above and elsewhere herein.

[0172] The present invention also encompasses non-reverse transcribed RNA embodiments in which cDNA is not made and the RNA transcripts are directly the subject of the analysis. Thus, in other embodiments, reagents are suitably used to quantify RNA transcripts directly. For example, oligonucleotide probes can be used to hybridize to transcripts for quantification of immune system biomarkers of the invention, using a nucleic acid hybridization analysis technique (e.g., microarray analysis), as described for example above. Thus, in some embodiments, a respective oligonucleotide probe is hybridized to a complementary nucleic acid sequence of an immune system biomarker transcript in the compositions of the invention. In illustrative examples of this type, the compositions may comprise labeled reagents that hybridize to transcripts for detecting and/or quantifying the transcripts. Representative reagents of this type include labeled oligonucleotide probes that hybridize to transcripts as well as labeled transcripts. The primers or probes may be immobilized or free in solution.

[0173] The present invention also extends to the management of HVaSIRS, or prevention of further progression of HVaSIRS, or assessment of the efficacy of therapies in subjects following positive diagnosis for the presence of HVaSIRS, in a subject. Once a subject is positively identified as having HVaSIRS, the subject may be administered a therapeutic agent for treating the HVaSIRS such as an anti-herpes viral agent, illustrative examples of which include; Aciclovir, Brivudine, Cidofovir, Famciclovir, Fomivirsen, Foscarnet, Ganciclovir, HDP-CDV, Idoxuridine, Letermovir, Maribavir, Penciclovir, Resiquimod, Sorivudine, Trifluridine, Tromantadine, Valaciclovir, Valganciclovir, Vidarabine or salts and combinations thereof.

[0174] Typically, the therapeutic agents will be administered in pharmaceutical (or veterinary) compositions together with a pharmaceutically acceptable carrier and in an effective amount to achieve their intended purpose. The dose of active compounds administered to a subject should be sufficient to achieve a beneficial response in the subject over time such as a reduction in, or relief from, the symptoms of HVaSIRS. The quantity of the pharmaceutically active compounds(s) to be administered may depend on the subject to be treated inclusive of the age, sex, weight and general health condition thereof. In this regard, precise amounts of the active compound(s) for administration will depend on the judgment of the practitioner. In determining the effective amount of the active compound(s) to be administered in the treatment or prevention of HVaSIRS, the medical practitioner or veterinarian may evaluate severity of any symptom or clinical sign associated with the presence of HVaSIRS or degree of HVaSIRS including, inflammation, blood pressure anomaly, tachycardia, tachypnea fever, chills, vomiting, diarrhea, skin rash, headaches, confusion, muscle aches, seizures. In any event, those of skill in the art may readily determine suitable dosages of the therapeutic agents and suitable treatment regimens without undue experimentation.

[0175] The therapeutic agents may be administered in concert with adjunctive (palliative) therapies to increase oxygen supply to major organs, increase blood flow to major organs and/or to reduce the inflammatory response. Illustrative examples of such adjunctive therapies include non-steroidal-anti-inflammatory drugs (NSAIDs), intravenous saline and oxygen.

[0176] The present invention also contemplates the use of the indicator-determining methods, apparatus, compositions and kits disclosed herein in methods of treating, preventing or inhibiting the development of HVaSIRS in a subject. These methods (also referred to herein as “treatment methods”) generally comprise: exposing the subject to a treatment regimen for treating HVaSIRS, or avoiding exposing the subject to a treatment regimen for treating a SIRS other than HVaSIRS based on an indicator obtained from an indicator-determining method as disclosed herein. In specific embodiments, the treatment methods comprise: (a) determining a plurality of biomarker values for at least two (e.g., 2, 3, 4, 5, 6, 7, 8, 9, 10, or more) HVaSIRS biomarkers of the subject, each biomarker value being indicative of a value measured or derived for a respective HVaSIRS biomarker; (b) determining an indicator using a combination of the plurality of biomarker values, the indicator being at least partially indicative of the presence, absence or degree of HVaSIRS, wherein: (i) at least two (e.g., 2, 3, 4, 5, 6, 7, 8, 9, 10, or more) HVaSIRS biomarkers have a mutual correlation in respect of the at least one condition that lies within a mutual correlation range, the mutual correlation range being between ±0.9; and (ii) the indicator has a performance value greater than or equal to a performance threshold representing the ability of the indicator to diagnose the presence, absence or degree of HVaSIRS, the performance threshold being indicative of an explained variance of at least 0.3; and (c) administering to the subject, on the basis that the indicator indicates the presence of HVaSIRS, an effective amount of an agent that treats or ameliorates the symptoms or reverses or inhibits the development of HVaSIRS.

[0177] In advantageous embodiments, the treatment methods comprise: (1) determining a plurality of measured biomarker values, each measured biomarker value being a measured value of an individual HVaSIRS biomarker of the subject; and (2) applying a function to at least two of the measured biomarker values to determine at least one derived biomarker value, the at least one derived biomarker value being indicative of a value of a corresponding derived HVaSIRS biomarker. The function suitably includes at least one of: (a) multiplying two biomarker values; (b) dividing two biomarker values; (c) adding two biomarker values; (d) subtracting two biomarker values; (e) a weighted sum of at least two biomarker values; (f) a log sum of at least two biomarker values; (g) a geometric mean of at least two biomarker values; and (h) a sigmoidal function of at least two biomarker values.

[0178] The present invention can be practiced in the field of predictive medicine for the purpose of diagnosis or monitoring the presence or development of HVaSIRS in a subject, and/or monitoring response to therapy efficacy. The biomarker profiles and corresponding indicators of the present invention further enable determination of endpoints in pharmacotranslational studies. For example, clinical trials can take many months or even years to establish the pharmacological parameters for a medicament to be used in treating or preventing HVaSIRS. However, these parameters may be associated with a biomarker profile and corresponding indicator of a health state (e.g., a healthy condition). Hence, the clinical trial can be expedited by selecting a treatment regimen (e.g., medicament and pharmaceutical parameters), which results in a biomarker profile associated with a desired health state (e.g., healthy condition). This may be determined for example by: (1) determining biomarker values that are measured or derived for at least two (e.g., 2, 3, 4, 5, 6, 7, 8, 9, 10, or more) corresponding HVaSIRS biomarker of a subject after treatment with a treatment regimen; (2) determining the indicator using the biomarker values; and (3) determining that the treatment regimen is effective for changing the health status of the subject to the desired health state (e.g., healthy condition) on the basis that the indicator indicates the presence of a healthy condition or the presence of a condition of a lower degree relative to the degree of the condition in the subject before treatment with the treatment regimen. As used herein, the term “degree” refers to the extent or stage of a condition. Alternatively, selection of the treatment regimen may be determined by: (a) determining a plurality of biomarker values for at least two (e.g., 2, 3, 4, 5, 6, 7, 8, 9, 10, or more) HVaSIRS biomarkers of a subject after treatment with a treatment regimen, each biomarker value being indicative of a value measured or derived for a respective HVaSIRS biomarker; (b) determining an indicator using a combination of the plurality of HVaSIRS biomarker values, the indicator being at least partially indicative of the presence, absence or degree of at least one condition selected from a healthy condition or HVaSIRS, wherein: (i) at least two (e.g., 2, 3, 4, 5, 6, 7, 8, 9, 10, or more) HVaSIRS biomarkers have a mutual correlation in respect of the at least one condition that lies within a mutual correlation range, the mutual correlation range being between ±0.9; and (ii) the indicator has a performance value greater than or equal to a performance threshold representing the ability of the indicator to diagnose the presence, absence or degree of the at least one condition, or to provide a prognosis for the at least one condition, the performance threshold being indicative of an explained variance of at least 0.3, and (c) determining that the treatment regimen is effective for changing the health status of the subject to the desired health state (e.g., healthy condition) on the basis that the indicator indicates the presence of a healthy condition or the presence of HVaSIRS of a lower degree relative to the degree of HVaSIRS in the subject before treatment with the treatment regimen. Accordingly, this aspect of the present invention advantageously provides methods of monitoring the efficacy of a particular treatment regimen in a subject (for example, in the context of a clinical trial) already diagnosed with HVaSIRS. These methods take advantage of measured or derived biomarker values that correlate with treatment efficacy to determine, for example, whether measured or derived biomarker values of a subject undergoing treatment partially or completely normalize during the course of or following therapy or otherwise shows changes associated with responsiveness to the therapy.

[0179] Accordingly, the invention provides methods of correlating a biomarker profile with an effective treatment regimen for HVaSIRS. In some embodiments, these methods comprise: (1) determining a biomarker profile defining biomarker values that are measured or derived for at least two (e.g., 2, 3, 4, 5, 6, 7, 8, 9, 10, or more) corresponding HVaSIRS biomarkers of a subject with HVaSIRS and for whom an effective treatment has been identified; and (2) correlating the biomarker profile so determined with an effective treatment regimen for HVaSIRS. In some embodiments, these methods comprise: (a) determining a biomarker profile defining a combination of at least two (e.g., 2, 3, 4, 5, 6, 7, 8, 9, 10, or more) biomarker values corresponding to values of at least two HVaSIRS biomarkers that can be measured or derived for a subject with HVaSIRS and for whom an effective treatment has been identified, wherein: (i) the at least two HVaSIRS biomarkers have a mutual correlation in respect of the condition that lies within a mutual correlation range, the mutual correlation range being between ±0.9; and (ii) the combination of at least two biomarker values has a performance value greater than or equal to a performance threshold representing the ability of the combination of at least two biomarker values to diagnose the presence, absence or degree of HVaSIRS, or to provide a prognosis for the HVaSIRS, the performance threshold being indicative of an explained variance of at least 0.3; and (b) correlating the biomarker profile so determined with an effective treatment regimen for HVaSIRS. In specific embodiments, an indicator or biomarker profile is correlated to a global probability or a particular outcome, using ROC curves.

[0180] The invention further provides methods of determining whether a treatment regimen is effective for treating a subject with HVaSIRS. In some embodiments, these methods comprise: (1) determining post-treatment biomarker values that are measured or derived for at least two (e.g., 2, 3, 4, 5, 6, 7, 8, 9, 10, or more) corresponding HVaSIRS biomarkers of a subject after treatment with a treatment regimen; (2) determining a post-treatment indicator using the post-treatment biomarker values, wherein the post-treatment indicator is at least partially indicative of the presence, absence or degree of HVaSIRS, wherein the post-treatment indicator indicates whether the treatment regimen is effective for treating HVaSIRS in the subject on the basis that post-treatment indicator indicates the presence of a healthy condition or the presence of HVaSIRS of a lower degree relative to the degree of HVaSIRS in the subject before treatment with the treatment regimen. In other embodiments, these methods comprise: (a) determining a plurality of post-treatment biomarker values, each post-treatment HVaSIRS biomarker value being indicative of a value measured or derived for at least one (e.g., 1, 2, 3, 4, 5, 6, 7, 8, 9, 10, or more) HVaSIRS biomarker of a subject after treatment with the treatment regimen; (b) determining a post-treatment indicator using a combination of the plurality of post-treatment biomarker values, the post-treatment indicator being at least partially indicative of the presence, absence or degree of HVaSIRS, wherein: (i) at the least two (e.g., 2, 3, 4, 5, 6, 7, 8, 9, 10, or more) HVaSIRS biomarkers have a mutual correlation in respect of the at least one condition that lies within a mutual correlation range, the mutual correlation range being between ±0.9; and (ii) the post-treatment indicator has a performance value greater than or equal to a performance threshold representing the ability of the post-treatment indicator to diagnose the presence, absence or degree of HVaSIRS, the performance threshold being indicative of an explained variance of at least 0.3, wherein the post-treatment indicator indicates whether the treatment regimen is effective for treating the HVaSIRS in the subject on the basis that post-treatment indicator indicates the presence of a healthy condition or the presence of HVaSIRS of a lower degree relative to the degree of HVaSIRS in the subject before treatment with the treatment regimen.

[0181] The invention can also be practiced to evaluate whether a subject is responding (i.e., a positive response) or not responding (i.e., a negative response) to a treatment regimen. This aspect of the invention provides methods of correlating a biomarker profile with a positive or negative response to a treatment regimen. In some embodiments, these methods comprise: (1) determining a biomarker profile defining biomarker values that are measured or derived for at least two (e.g., 2, 3, 4, 5, 6, 7, 8, 9, 10, or more) corresponding HVaSIRS biomarkers of a subject following commencement of the treatment regimen; and (2) correlating the biomarker profile so determined with a positive or negative response to the treatment regimen. In other embodiments, these methods comprise: (a) determining a biomarker profile defining a combination of at least two (e.g., 2, 3, 4, 5, 6, 7, 8, 9, 10, or more) biomarker values corresponding to values of at least two VaSIRS biomarkers that can be measured or derived for a subject following commencement of the treatment regimen, wherein: (i) the at least two HVaSIRS biomarkers have a mutual correlation in respect of HVaSIRS, which lies within a mutual correlation range, the mutual correlation range being between ±0.9; and (ii) the combination of at least two biomarker values has a performance value greater than or equal to a performance threshold representing the ability of the combination of at least two biomarker values to diagnose the presence, absence or degree of HVaSIRS, or to provide a prognosis for the HVaSIRS, the performance threshold being indicative of an explained variance of at least 0.3; and (b) correlating the biomarker profile so determined with a positive or negative response to the treatment regimen.

[0182] The invention also encompasses methods of determining a positive or negative response to a treatment regimen by a subject with HVaSIRS. In some embodiments, these methods comprise: (1) correlating a reference biomarker profile with a positive or negative response to the treatment regimen, wherein the biomarker profile defines biomarker values that are measured or derived for at least two (e.g., 2, 3, 4, 5, 6, 7, 8, 9, 10, or more) corresponding HVaSIRS biomarkers of a control subject or control group; (2) determining a sample biomarker profile defining biomarker values that are measured or derived for the at least two (e.g., 2, 3, 4, 5, 6, 7, 8, 9, 10, or more) corresponding HVaSIRS biomarker of the subject following commencement of the treatment regimen, wherein the sample biomarker profile indicates whether the subject is responding positively or negatively to the treatment regimen, based on the correlation of the reference biomarker signature with the positive or negative response to the treatment regimen. In other embodiments, the methods comprise: (a) correlating a reference biomarker profile with a positive or negative response to the treatment regimen, wherein the biomarker profile defines a combination of at least two (e.g., 2, 3, 4, 5, 6, 7, 8, 9, 10, or more) biomarker values corresponding to values of at least two HVaSIRS biomarkers that are measured for or derived from a control subject or control group, wherein: (i) the at least two HVaSIRS biomarkers have a mutual correlation in respect of HVaSIRS, which lies within a mutual correlation range, the mutual correlation range being between ±0.9; and (ii) the combination of at least two biomarker values has a performance value greater than or equal to a performance threshold representing the ability of the combination of at least two biomarker values to diagnose the presence, absence or degree of HVaSIRS, or to provide a prognosis for the HVaSIRS, the performance threshold being indicative of an explained variance of at least 0.3; (b) determining a sample biomarker profile defining a combination of at least two (e.g., 2, 3, 4, 5, 6, 7, 8, 9, 10, or more) biomarker values corresponding to values of the at least two VaSIRS biomarkers that are measured or derived from the subject following commencement of the treatment regimen, wherein the sample biomarker profile indicates whether the subject is responding positively or negatively to the treatment regimen, based on the correlation of the reference biomarker profile with the positive or negative response to the treatment regimen.

[0183] In related embodiments, the present invention further contemplates methods of determining a positive or negative response to a treatment regimen by a biological subject. In some embodiments, these methods comprise: (1) determining a sample biomarker profile defining biomarker values that are measured or derived for at least two (e.g., 2, 3, 4, 5, 6, 7, 8, 9, 10, or more) corresponding HVaSIRS biomarker of a subject following commencement of the treatment regimen, wherein the sample biomarker profile is correlated with a positive or negative response to the treatment regimen; and (2) determining whether the subject is responding positively or negatively to the treatment regimen based on the sample biomarker profile. In other embodiments, these methods comprise: (a) determining a sample biomarker profile defining a combination of at least two (e.g., 2, 3, 4, 5, 6, 7, 8, 9, 10, or more) biomarker values corresponding to values of at least two HVaSIRS biomarkers that are measured for or derived from a subject following commencement of the treatment regimen, wherein: (i) the at least two HVaSIRS biomarkers have a mutual correlation in respect of HVaSIRS, which lies within a mutual correlation range, the mutual correlation range being between ±0.9; and (ii) the combination of at least two biomarker values has a performance value greater than or equal to a performance threshold representing the ability of the combination of at least two biomarker values to diagnose the presence, absence or degree of HVaSIRS, or to provide a prognosis for the HVaSIRS, the performance threshold being indicative of an explained variance of at least 0.3, wherein the sample biomarker profile is correlated with a positive or negative response to the treatment regimen; and (b) determining whether the subject is responding positively or negatively to the treatment regimen based on the sample biomarker profile.

[0184] The above methods can be practiced to identify responders or non-responders relatively early in the treatment process, i.e., before clinical manifestations of efficacy. In this way, the treatment regimen can optionally be discontinued, a different treatment protocol can be implemented and/or supplemental therapy can be administered. Thus, in some embodiments, a sample HVaSIRS biomarker profile is obtained within about 2 hours, 4 hours, 6 hours, 12 hours, 1 day, 2 days, 3 days, 4 days, 5 days, 1 week, 2 weeks, 3 weeks, 4 weeks, 6 weeks, 8 weeks, 10 weeks, 12 weeks, 4 months, six months or longer of commencing therapy.

[0185] The present invention also contemplates methods in which the indicator-determining method of the invention is implemented using one or more processing devices. In some embodiments, these methods comprise: (1) determining a pair of biomarker values, the pair of biomarker values being selected from the group consisting of: (a) a first pair of biomarker values indicative of a concentration of polynucleotide expression products of a Group A HVaSIRS biomarker gene (e.g., CCL5) and a Group B HVaSIRS biomarker gene (e.g., FLNB); and (b) a second pair of biomarker values indicative of a concentration of polynucleotide expression products of a Group C HVaSIRS biomarker gene (e.g., PPP2R2B) gene and a Group D HVaSIRS biomarker gene (e.g., GNG7); and (c) a third pair of biomarker values indicative of a concentration of polynucleotide expression products of a Group E HVaSIRS biomarker gene (e.g., CASZ′1) gene and a Group F HVaSIRS biomarker gene (e.g., VASH1); (2) determining an indicator indicative of a ratio of the concentrations of the polynucleotide expression products using all three biomarker values; (3) retrieving previously determined first, second and third indicator references from a database, the first, second and third indicator references being determined based on indicators determined from first, second and third groups of a reference population, one of the groups consisting of individuals diagnosed with HVaSIRS; (4) comparing the indicator to the first, second and third indicator references; (5) using the results of the comparison to determine a probability indicative of the subject having or not having HVaSIRS; and (6) generating a representation of the probability, the representation being displayed to a user to allow the user to assess the likelihood of a biological subject having HVaSIRS.

[0186] Similarly apparatus can be provided for determining the likelihood of a subject having HVaSIRS, the apparatus including: (A) a sampling device that obtains a sample taken from a subject, the sample including polynucleotide expression products; (B) a measuring device that quantifies polynucleotide expression products within the sample to determine three biomarker values, the three biomarker values being selected from the group consisting of: (a) a first pair of biomarker values indicative of a concentration of polynucleotide expression products of a Group A HVaSIRS biomarker gene (e.g., CCL5) and a Group B HVaSIRS biomarker gene (e.g., FLNB); and (b) a second pair of biomarker values indicative of a concentration of polynucleotide expression products of a Group C HVaSIRS biomarker gene (e.g., PPP2R2B) gene and a Group D HVaSIRS biomarker gene (e.g., GNG7); and (c) a third pair of biomarker values indicative of a concentration of polynucleotide expression products of a Group E HVaSIRS biomarker gene (e.g., CASZ1) gene and a Group F HVaSIRS biomarker gene (e.g., VASH1); (C) at least one processing device that: (i) receives an indication of the pair of biomarker values from the measuring device; (ii) determines an indicator using a ratio of the concentration of the first, second and third polynucleotide expression products using the biomarker values; (iii) compares the indicator to at least one indicator reference; (iv) determines a likelihood of the subject having or not having HVaSIRS condition using the results of the comparison; and (v) generates a representation of the indicator and the likelihood for display to a user.

[0187] The present invention also encompasses methods for differentiating between HVaSIRS and another SIRS other than HVaSIRS in a subject, including SIRS generated by other non-herpesvirus viral infections (nHVVaSIRS). These methods suitably comprise: (a) obtaining a sample taken from a subject showing a clinical sign of SIRS, the sample including polynucleotide expression products; (b) in a measuring device: (i) amplifying at least some polynucleotide expression products in the sample; (ii) determining an amplification amount representing a degree of amplification required to obtain a defined level of polynucleotide expression products including: amplification amounts for a first pair of polynucleotide expression products of a Group A HVaSIRS biomarker gene (e.g., CCL5) and a Group B HVaSIRS biomarker gene (e.g., FLNB); and amplification amounts for a second pair of polynucleotide expression products of a Group C HVaSIRS biomarker gene (e.g., PPP2R2B) gene and a Group D HVaSIRS biomarker gene (e.g., GNG7); and amplification amounts for a third pair of polynucleotide expression products of a Group E HVaSIRS biomarker gene (e.g., CASZ1) gene and a Group F HVaSIRS biomarker gene (e.g., VASH1); (c) in a processing system: (i) retrieving the amplification amounts; (ii) determining an indicator by: determining a first derived biomarker value indicative of a ratio of concentrations of the first pair of polynucleotide expression products by determining a difference between the amplification amounts for the first pair; determining a second derived biomarker value indicative of a ratio of concentrations of the second pair of polynucleotide expression products by determining a difference between the amplification amounts for the second pair; determining a third derived biomarker value indicative of a ratio of concentrations of the third pair of polynucleotide expression products by determining a difference between the amplification amounts for the third pair; (d) determining the indicator by adding the first, second and third derived biomarker values; (e) retrieving previously determined first, second and third indicator references from a database, wherein the first, second and third indicator references are distributions of indicators determined for first and second groups of a reference population, the first and second groups consisting of individuals diagnosed with HVaSIRS and the other SIRS, respectively; (f) comparing the indicator to the first and second indicator references; (g) using the results of the comparison to determine a probability of the subject being classified within the first or second group; (h) generating a representation at least partially indicative of the indicator and the probability; and (i) providing the representation to a user to allow the user to assess the likelihood of a subject having or not having HVaSIRS or the other SIRS.

[0188] Additionally, methods can be provided for determining an indicator used in assessing a likelihood of a subject having a presence, absence or degree of HVaSIRS, or in providing a prognosis for a HVaSIRS. These methods suitably include: (1) determining a plurality of biomarker values, each biomarker value being indicative of a value measured or derived for at least one corresponding HVaSIRS biomarker of the subject and being at least partially indicative of a concentration of the HVaSIRS biomarker in a sample taken from the subject; (2) determining the indicator using a combination of the plurality of biomarker values, wherein: at least two biomarkers have a mutual correlation in respect of HVaSIRS that lies within a mutual correlation range, the mutual correlation range being between ±0.9; and the indicator has a performance value greater than or equal to a performance threshold representing the ability of the indicator to diagnose the presence, absence or degree of HVaSIRS, or to provide a prognosis for the HVaSIRS, the performance threshold being indicative of an explained variance of at least 0.3.

[0189] In order that the invention may be readily understood and put into practical effect, particular preferred embodiments will now be described by way of the following non-limiting examples.

### EXAMPLES

### Example 1

### Groups A, B, C, D, E and F Biomarkers. Biomarkers are Grouped Based on their Correlation to CCL5, FLNB, PPP2R2B, GNG7, CASZ1 AND VASH1

[0190] Three pairs of derived biomarkers (CCL5/FLNB; PPP2R2B/GNG7; CASZ1/VASH1) were discovered that provided the highest AUC across all of the herpesvirus datasets studied and minimal AUC across all of the non-herpesvirus datasets studied. Biomarkers as ratios that provided mean AUC >0.85 (see Table 5 for full list of derived biomarkers) with the greatest mean difference to non-herpesvirus datasets were then allocated to one of six Groups, as individual biomarkers, based on their correlation to either CCL5 (Group A), FLNB (Group B), PPP2R2B (Group C), GNG7 (Group D), CASZ1 (Group E) or VASH1 (Group F), as presented in Table 10.

### Example 2

### HVaSIRS Biomarker Derivation (Derived Biomarkers)

[0191] An illustrative process for the identification of HVaSIRS biomarkers for use in diagnostic algorithms will now be described.

[0192] Gene expression data (derived from clinical trials performed by the inventors or from Gene Expression Omnibus) were analysed using a variety of statistical approaches to identify individual and derived biomarkers (ratios) but largely follows the method described in WO 2015/117204. Individual and derived markers were graded based on performance (AUC).

[0193] Datasets used for discovery were derived from GEO (which are all MIAME-compliant) with the following restrictions; peripheral blood samples were used, appropriate controls were used, an appropriate number of samples were used to provide significance following False-Discovery Rate (FDR) adjustment, all data passed standard quality control metrics, principle component analysis did not reveal any artifacts or potential biases. A clinical trial (MARS) was also conducted. In this trial, peripheral blood samples were obtained from 624 patients retrospectively diagnosed with either SIRS or sepsis. Some patients, but not all, suspected of having a viral infection, were also tested for the presence of specific viral nucleic acid using PCR in body fluid samples, or the presence of specific anti-viral antibodies in plasma. The datasets were divided into two groups—“discovery” and “validation” listed in Table 1 and Table 3.

[0194] The main dataset used for signature “discovery” was GSE40366 (see Table 1 for a description). A subset of subjects in this dataset were used including a nonagenarians' cohort where patients were split into binary categories based on their CMV titer. The “Controls” group contained those patients with a CVM-titer of zero and “Cases” were those patients with a CMV-titer >=20,000. This dataset was the core dataset. Biomarkers discovered in this dataset were then validated using additional data.

[0195] All datasets were initially log 2 transformed. Prior to analysis each dataset was filtered to include only the top 7145 genes as measured by the mean gene expression level across all samples in the dataset (max value of 8 in log space). This ensured that only those genes with relatively strong expression were analysed and that a limited number of candidates were taken forward to the next compute-time intensive step. ROC and AUC were then calculated across all biomarkers using the difference in the log 2 of the expression values.

[0196] Derived biomarkers were calculated for the core dataset (GSE40366) by subtracting the log₂^{Numerator} from the log₂^{Denominator}. The ratio direction was set to “<” which means the denominator should be high in “Cases” and low in “Controls with an AUC >0.5 and low in “Cases” and high in “Controls” with an AUC <0.5. Ratios with an AUC of >=80 (N=1,156,726) in GSE40366 were filtered through to the next phase of analysis. This represented 4.6% of the global ratio-space for this dataset. Any ratios below this threshold were discarded. Further, and as part of “subtracting” away non-herpes and non-viral inflammation biomarkers, various datasets were merged (see below). As part of this merging process only those biomarkers common across all datasets were able to be used. As such, the total number of ratios assessed was 104,790 rather than the total number available (1,156,726).

[0197] To ensure that the discovered derived biomarkers from the core dataset were specific to herpesvirus inflammation (were not indicative of inflammation associated with other viral infections, bacterial infection, autoimmune disease, and other non-herpesvirus systemic inflammatory conditions) a number of additional datasets (n=8, listed in Table 2) were used to identify derived biomarkers of generalised, non-herpes and non-viral inflammation. These datasets were used to “subtract” away non-herpes and non-viral biomarkers. These datasets were subject to the same restrictions as the “discovery” and “validation” datasets including; peripheral blood samples were used, appropriate controls were used, an appropriate number of samples were used to provide significance following False-Discovery Rate (FDR) adjustment, all data passed standard quality control metrics, principle component analysis did not reveal any artifacts or potential biases.

[0198] All the datasets were merged (discovery (Table 1), non-herpesvirus/non-viral inflammation (Table 2), validation (Table 3)). “Discovery” and “validation” datasets were termed “positive validation” and non-herpesvirus/non-viral inflammation datasets were termed “negative validation”. Each individual dataset was normalized by mean centering to zero and forcing gene variance to one as follows: The mean of a gene in a dataset was calculated in three steps: (a) calculate the mean of the cases, (b) calculate the mean of the controls, and (c) calculate the mean of those two values. Once the mean was calculated, the expression values for that gene in each sample were adjusted by subtracting the mean value. The expression matrix was then standardized to unit variance by dividing by the genes variance. All datasets were combined into a single expression matrix after normalizing each dataset individually. The final dimensions of the merged dataset were 2085 genes×1117 samples.

[0199] Biomarker ratios were computed for every combination in the positive validation set and then a threshold of AUC >0.85 (vs. negative validation set) was applied to the results to filter higher confidence ratios through to a greedy search algorithm. This resulted in 452 ratios containing 174 unique genes. A lower cut-off filter of an AUC of 0.85 was chosen for the following three reasons: 1) differentiating latent and active herpesvirus infections can be difficult and in one report in only 60% of those patients with clinical signs could a herpesvirus be found using PCR (Troendle Atkins, J., Demmler, G. J., Williamson, W. D., McDonald, J. M., Istas, A. S., & Buffone, G. J. (1994). Polymerase chain reaction to detect cytomegalovirus DNA in the cerebrospinal fluid of neonates with congenital infection. The Journal of Infectious Diseases, 169(6), 1334-1337; 2) The utility of CMV viremia, antigenemia, DNAemia and IgM antibody assays in fetal blood for identifying fetuses infected with CMV has poor sensitivity (41.1%-84.8%) (Revello, M. G., Furione, M., Rognoni, V., Arossa, A., & Gerna, G. (2014). Cytomegalovirus DNAemia in pregnant women. Journal of Clinical Virology: The Official Publication of the Pan American Society for Clinical Virology, 61(4), 590-592); 3) fewer than 50% of pregnant women have detectable CMV in their blood as assessed by either PCR or pp65 antigenemia at the time of serological diagnosis (Ross S A, Novak Z, Pati S, Boppana S B. Diagnosis of Cytomegalovirus Infections. Infectious disorders drug targets. 2011; 11(5):466-474). Thus, current existing diagnostic procedures and tests for determining active herpesvirus infections do not have good diagnostic performance, and in many instances no pathogen or antibody response is detected in samples taken at the time the patient presents with clinical signs. A herpesvirus signature with an AUC of at least 0.85 will therefore have greater clinical utility than most existing herpesvirus diagnostic assays in determining an active infection, and at the critical time when the patient presents with clinical signs.

### Example 3

### HVaSIRS Biomarker Derivation (Combination of Derived Biomarkers)

[0200] A greedy search algorithm was then applied. The application of this search algorithm was designed to maximize the difference in AUC between the negative validation and positive validation sets with each addition of a biomarker ratio. The algorithm actively searches the ratio-space for a decision boundary that takes into account the negative dataset and forces its signal down. This is an iterative process that happens every time a new biomarker ratio is added to the signature.

[0201] Following the application of the greedy search algorithm the top three biomarker ratio combinations identified were CCL5/FLNB, PPP2R2B/GNG7 and CASZ1/VASH1. The combination of these three biomarker ratios gave an AUC of 0.947 for separating the positive validation data from the negative validation data which was considered to be the minimal set of derived biomarkers with optimal commercial utility. Optimal commercial utility in this instance means consideration of the following non-limiting factors; diagnostic performance, clinical utility, diagnostic noise (introduced by using too many derived biomarkers), transferability to available molecular chemistries (e.g. PCR, microarray, DNA sequencing), transferability to available point-of-care platforms (e.g. Biocartis Idylla, Cepheid GeneXpert, Becton Dickinson BD Max, Curetis Unyvero, Oxford Nanopore Technologies MinION), cost of assay manufacture (the more reagents and biomarkers the larger the cost), ability to multiplex biomarkers, availability of suitable reporter dyes, complexity of results interpretation.

### Example 4

### HVaSIRS Biomarker Performance (Derived Biomarkers and Combined Derived Biomarkers)

[0202] As discussed, following the final filtering step based on a mean AUC of 0.85 in positive validation datasets, 452 derived biomarkers remained. The performance of each of these 452 derived biomarkers, based on the decreasing mean difference in AUC between positive and negative validation datasets, is shown in Table 5.

[0203] Following normalization of all datasets and a greedy search the best performing individual derived biomarker was CCL5/FLNB with an AUC of 0.864. Note: the best performing derived biomarker for the combined, normalized dataset is different to the best performing derived biomarker listed in Table 5 because of the way in which AUC was calculated (mean of individual datasets versus mean of combined datasets). The best second unique derived biomarker to add to the first derived biomarker was PPP2R2B/GNG7. The AUC obtained across the normalized dataset using these two derived biomarkers was 0.914, an 0.05 improvement over the use of a single derived biomarker (see FIG. 1 and FIG. 2). The addition of a third derived biomarker (CASZ1/VASH1) improved the AUC by 0.033 to 0.947. It is possible that a fourth derived biomarker created overfitting and noise (see FIG. 2). Thus, it was considered that an advantageous HVaSIRS signature comprises the following three derived biomarkers: CCL5/FLNB; PPP2R2B/GNG7; CASZ1/VASH1. FIG. 1, FIG. 2 and FIG. 3 show the effect on the overall AUC of sequentially adding derived biomarkers to CCL5/FLNB.

[0204] FIG. 4, FIG. 5 and FIG. 6 show box and whisker plots demonstrating the performance of each of the top three derived biomarkers in both the negative validation datasets (9, top row) and positive validation datasets (5, bottom row).

### Example 5

### HVaSIRS Biomarker Profiles (Grouping)

[0205] The HVaSIRS biomarker profiles can be grouped: individual biomarkers, derived biomarkers, combinations of derived biomarkers.

[0206] There are six biomarkers in the best performing three derived biomarker signature: CCL5/FLNB; PPP2R2B/GNG7; CASZ1/VASH1, 452 derived biomarkers with an AUC >0.85 and 174 unique biomarkers. For each unique biomarker, a correlation coefficient was calculated. Table 10 lists 174 unique biomarkers and their correlation to each of the six biomarkers in the top performing three-derived biomarker signature. Each set of biomarkers make up Groups A, B, C, D, E and F respectively.

[0207] The best combination of derived biomarkers was determined to be: CCL5/FLNB; PPP2R2B/GNG7; CASZ1/VASH1 (Group G).

[0208] Plots of common numerators and denominators in the total 452 derived biomarkers are shown in FIG. 7 and FIG. 8.

### Example 6

### Analysis of Derived Biomarkers

[0209] Performance (AUC) of the 452 derived biomarkers across all datasets (as individual datasets rather than a single combined dataset) is shown in Table 5 and in FIG. 4, FIG. 5 and FIG. 6. Some derived biomarkers work better in some datasets than others. The combination of CCL5/FLNB; PPP2R2B/GNG7; CASZ1/VASH1 ensures strong diagnostic performance across all positive validation datasets with minimal diagnostic performance in all negative validation datasets.

[0210] Some individual biomarkers are part of high performing derived biomarkers more frequently than others. FIG. 7 and FIG. 8 show plots of biomarkers that occur frequently as numerators or denominators respectively. OASL and PPP2R2B are the most frequent numerators, and GNG7 and FLNB are the most frequent denominators.

### Example 7

### Example Applications of HVaSIRS Biomarker Profiles

[0211] Use of the above described biomarkers and resulting HVaSIRS biomarker profiles in patient populations and benefits in respect of differentiating various conditions, will now be described.

[0212] An assay capable of differentiating patients with a herpesvirus infection can be used in multiple patient populations, and in conjunction with presenting clinical signs, including those patients located in: Intensive Care Units (medical and surgical ICU), medical wards, Emergency Departments (ED), medical clinics. Such an assay can also be used as part of efforts to ensure judicious use of antibiotic and anti-viral compounds, detection of re-activation of latent herpesviruses, determination of the severity of a HVaSIRS, and determination of the etiology of systemic inflammation when due to an active herpesvirus infection.

### Differentiating an Immune Response to Key Herpesvirus Pathogens in Patients with Non-Specific Clinical Signs

[0213] Many patients present to medical facilities with non-specific clinical signs. Table 6 lists some key human viral pathogens (and virus type) based on the non-specific clinical signs of fever, rash and aches. Those herpesvirus types able to be detected through specific host response biomarkers outlined herein are underlined. The biomarkers described herein can therefore be used to determine the presence and extent of a HVaSIRS and enable clinicians to choose appropriate downstream diagnostic tests, treatments and management regimens.

### Detecting an Immune Response to Key Herpesvirus Pathogens Early in the Course of Infection, and when Patients Present, and when it is Difficult to Detect Herpesvirus Antigen

[0214] There are a limited number of human viruses that cause viremia and of those that do a viremia is usually only present in blood for a short period as part of the pathogenesis, making direct detection of the pathogen difficult using blood as a sample. Further, it takes 10-14 days following a primary infection for specific immunoglobulin G antibodies to appear in blood. Active infection with a herpesvirus (a primary infection or re-activation of a latent infection) causes a detectable systemic immune response (HVaSIRS) prior to, and during, the development of peak clinical signs. As such, HVaSIRS biomarkers are useful for early diagnosis, diagnosis, differentiation from other viral causes of systemic inflammation and monitoring in the key periods of viral incubation, when patients present with clinical signs and when virus antigen may or may not be detectable. The specific HVaSIRS described herein will enable clinicians to diagnose an active herpesvirus infection early in the course of infection and when clinical signs are present so that they can make appropriate therapy and management decisions. Table 7 lists common human viruses that are known to cause SIRS and a viremia along with a supporting scientific reference.

### Detecting an Immune Response to Key Herpesvirus Pathogens for which there are Tailored Anti-Viral Therapies

[0215] Those viruses that cause a viremia and can be treated with an anti-viral agent are listed in Table 8. It is important that viruses in Table 8 be detected, differentiated and identified because 1) they can be treated with anti-viral medication, and 2) most other viral infections cause transient clinical signs and are not life-threatening. In such viral infections it is also important to know if there is a co-infection with bacteria so that antibiotics can be prescribed. The biomarkers described herein can determine the extent of systemic inflammation due to a herpesvirus infection and, as such, judgment can be made as to whether antibiotic prescription is appropriate. Further, once it has been determined that systemic inflammation is specifically due to a herpesvirus an appropriate choice of anti-viral therapy can be made. Anti-herpesvirus therapies are more effective early in the course of disease. The biomarkers outlined in this patent also allow for early and specific diagnosis so that anti-herpesvirus therapy can be used efficaciously.

### Detecting an Immune Response to Herpesvirus Pathogens that can Cause Respiratory Disease

[0216] A list of common and less common viral pathogens that cause community acquired pneumonia in adults and children can be found in Table 9 (based on Pavia A T (2013) What is the Role of Respiratory Viruses in Community-Acquired Pneumonia? Infectious Disease Clinics of North America 27: 157-175). Herpesviruses can cause respiratory clinical signs, especially in immunocompromised patients, and in some instances can lead to complications, including exacerbation of existing pathologies, or concurrent or subsequent viral or bacterial infections. Patients presenting to medical facilities with respiratory herpesvirus infection(s) need to be differentiated from those with other viral infections, and from those with bacterial infections, so that appropriate anti-herpesvirus therapy or antibiotics can be administered. The biomarkers described in this patent can determine the presence and extent of systemic inflammation due to a respiratory herpesvirus infection and, as such, judgment can be made regarding appropriate management procedures, specific anti-viral treatments and/or antibiotic treatments.

### Differentiating Patients with a Herpesvirus Condition in ICU

[0217] It has been shown that greater than 50% of patients in medical ICUs have inSIRS and greater than 80% in surgical ICUs have inSIRS (Brun-Buisson C (2000) The epidemiology of the systemic inflammatory response. Intensive Care Med 26 Suppl 1: S64-S74). From a clinician's perspective these patients present with non-specific clinical signs and the source and type of infection, if there is one, must be determined quickly so that appropriate therapies can be administered. Patients with inSIRS have a higher likelihood of being infected with bacteria or fungi (compared to patients without inSIRS), and have a much higher 28-day mortality (Constet P, Storgaard M, Lassen A T (2009) The Systemic Inflammatory Response Syndrome (SIRS) in acutely hospitalised medical patients: a cohort study. Scand J Trauma Resusc Emerg Med 17: 67. doi:10.1186/1757-7241-17-67). Further, patients with prolonged systemic inflammation due to bacterial infection have a higher frequency of viral infections, possibly due to reactivation of latent viruses as a result of immunosuppression (Walton, A. H., Muenzer, J. T., Rasche, D., Boomer, J. S., & Sato, B. (2014). Reactivation of multiple viruses in patients with sepsis. PLoS ONE). The high prevalence of inSIRS in ICU, the high risk of infection and death in inSIRS patients, the re-activation of viruses in ICU patients with bacterial systemic inflammation, and the benefits of early intervention in patients with bacterial systemic inflammation (Rivers E P (2010) Point: Adherence to Early Goal-Directed Therapy: Does It Really Matter? Yes. After a Decade, the Scientific Proof Speaks for Itself. Chest 138: 476-480) creates a need for triaging patients with clinical signs of inSIRS to determine whether they have a viral or bacterial infection, or both. Monitoring intensive care patients on a regular basis with biomarkers of the present invention will allow medical practitioners to determine the presence, or absence, of a herpesvirus infection so that appropriate anti-herpesvirus therapies could be administered.

[0218] In pediatric ICUs the incidence of viral infections is reportedly low (1%), consisting mostly of enterovirus, parechovirus and respiratory syncytial virus infections (Verboon-Maciolek, M. A., Krediet, T. G., Gerards, L. J., Fleer, A., & van Loon, T. M. (2005). Clinical and epidemiologic characteristics of viral infections in a neonatal intensive care unit during a 12-year period. The Pediatric Infectious Disease Journal, 24(10), 901-904). However, one of the most common congenital viral infections in humans is CMV, affecting between 20,000 and 40,000 infants per year in the USA (Ross S A, Novak Z, Pati S, Boppana S B. Diagnosis of Cytomegalovirus Infections. Infectious disorders drug targets. 2011; 11(5):466-474). Further, because the mortality rate of virus-infected patients is high, and they present with similar clinical signs to those with bacterial or fungal infections, it is important to rule out the possibility of a viral infection in pediatric patients so that other appropriate therapies can be administered, or to rule in a herpesvirus infection so that appropriate therapies can be administered and management procedures performed.

[0219] Determining which patients have herpesvirus infections in the ICU will allow for early intervention, appropriate choice of therapies, when to start and stop therapies, whether a patient needs to be isolated, when to start and stop appropriate patient management procedures, and in determining how a patient is responding to therapy. Information provided by these biomarkers will therefore allow medical intensivists to tailor and modify therapies and management procedures to ensure that patients with active herpesvirus infections survive and spend less time in intensive care. Less time in intensive care leads to considerable savings in medical expenses including through less occupancy time and through appropriate use and timing of medications.

### Differentiating Patients with a Viral Condition in Hospital Wards

[0220] In a study in a US hospital of over 4000 inpatients over an 11-week period at least one episode of fever occurred in 1,194 patients (29%) (McGowan J E J, Rose R C, Jacobs N F, Schaberg D R, Haley R W (1987) Fever in hospitalized patients. With special reference to the medical service. Am J Med 82: 580-586). The rate of fever was highest on medical and surgical services and the authors found that both infectious and non-infectious processes played important roles in the cause. However, determining the cause of fever was complicated by the fact that over 390 different factors were identified. In this study, a review of 341 episodes of fever in 302 patients on the medical service identified a single potential cause in 56%, multiple factors were present in 26%, and no potential causes were found in 18%. Of all factors identified, 44% were community-acquired infections, 9% were nosocomial infections, 20% possibly involved infection, and 26% were non-infectious processes. Thus, fever is common in hospital surgical and medical wards, there are many causes including infectious and non-infectious, diagnosis is difficult and in many instances a cause is not found. The biomarkers outlined in this patent can differentiate herpesvirus infections from other causes of SIRS which will assist medical practitioners in determining the cause of fever, ensuring that resources are not wasted on unnecessary diagnostic procedures and that patients are managed and treated appropriately.

### Differentiating Patients with a Herpesvirus Condition in Emergency Departments

[0221] In 2010, approximately 130 million people presented to emergency departments in the USA and the third most common primary reason for the visit was fever (5.6 million people had a fever (>38° C.) and for 5 million people it was the primary reason for the visit) (Niska R, Bhuiya F, Xu J (2010) National hospital ambulatory medical care survey: 2007 emergency department summary. Natl Health Stat Report 26: 1-31). Of those patients with a fever, 664,000 had a fever of unknown origin—that is, the cause of the fever was not obvious at presentation. As part of diagnosing the reason for the emergency department visit 48,614,000 complete blood counts (CBC) were performed and 5.3 million blood cultures were taken. In 3.65 million patients presenting the primary diagnosis was “infectious” and in approximately 25% of cases (32.4 million) antibiotics were administered. 13.5% of all people presenting to emergency were admitted to hospital. Clinicians in emergency need to determine the answer to a number of questions quickly, including: what is the reason for the visit, is the reason for the visit an infection, does the patient need to be admitted? The diagnosis, treatment and management of patients with a fever, inSIRS, HVaSIRS or bacterial systemic inflammation are different. By way of example, a patient with a fever without other inSIRS clinical signs and no obvious source of viral, or microbial infection may be sent home, or provided with other non-hospital services, without further hospital treatment. However, a patient with a fever may have early BaSIRS, and not admitting such a patient and aggressively treating with antibiotics may put their life at risk. Such a patient may also have HVaSIRS and quickly deteriorate, or progress to BaSIRS without appropriate hospital care and/or the use of anti-viral agents. The difference in the number of patients presenting to emergency that are ultimately diagnosed with an “infection” (3.65 million) and the number treated with antibiotics (32.4 million) suggests the following; 1) diagnostic tools that determine the presence of an infection are not available, or are not being used, or are not accurate enough, or do not provide strong enough negative predictive value, or are not providing accurate information that can be acted on within a reasonable timeframe 2) when it comes to suspected infection, and because of the acute nature of infections, clinicians err on the side of caution by administering antibiotics. Further, in a study performed in the Netherlands on patients presenting to emergency with fever, 36.6% of patients admitted to hospital had a suspected bacterial infection (that is, it was not confirmed) (Limper M, Eeftinck Schattenkerk D, de Kruif M D, van Wissen M, Brandjes D P M, et al. (2011) One-year epidemiology of fever at the Emergency Department. Neth J Med 69: 124-128). This suggests that a large proportion of patients presenting to emergency are admitted to hospital without a diagnosis. The biomarkers outlined in this patent can identify those patients with an active herpesvirus infection from those without an active herpesvirus infection, assisting medical practitioners in triaging patients with fever or SIRS. Such effective triage tools make best use of scarce hospital resources, including staff, equipment and therapies. Accurate triage decision-making also ensures that patients requiring hospital treatment are given it, and those that don't are provided with other appropriate services.

[0222] In a study performed in Argentina in patients presenting to emergency with influenza-like symptoms, only 37% of samples taken and analysed for the presence of viruses (using immunofluorescence, RT-PCR and virus culture) were positive (Santamaria, C., Uruena, A., Videla, C., Suarez, A., Ganduglia, C., Carballal, G., et al. (2008). Epidemiological study of influenza virus infections in young adult outpatients from Buenos Aires, Argentina. Influenza and Other Respiratory Viruses, 2(4), 131-134). In a study based in Boston, USA, acute respiratory infections were a common reason children presented to emergency departments in Winter (Bourgeois, F. T., Valim, C., Wei, J. C., McAdam, A. J., & Mandl, K. D. (2006). Influenza and other respiratory virus-related emergency department visits among young children. Pediatrics, 118(1), e1-8). Using a respiratory classifier (based on clinical signs) these authors found that in children less than, or equal to, 7 years of age an acute respiratory infection was suspected in 39.8% of all emergency department visits (less at a whole city or state level). In this latter study only 55.5% of these patients had a virus isolated. Thus, a large percentage of patients with influenza-like symptoms presenting to emergency are likely not being diagnosed as having a viral infection using laboratory-based tests. The biomarkers outlined in this patent can identify those patients with an active herpesvirus infection from those without an active herpesvirus infection, assisting medical practitioners in making an accurate diagnosis of an active herpesvirus infection in patients with influenza-like symptoms. Such patients can then be appropriately treated with anti-viral therapies. Accurate diagnosis of an active viral infection also assists in ensuring that only those patients that need either anti-viral treatment or antibiotics receive them which may lead to fewer side effects and fewer days on antibiotics (Adcock, P. M., Stout, G. G., Hauck, M. A., & Marshall, G. S. (1997). Effect of rapid viral diagnosis on the management of children hospitalized with lower respiratory tract infection. The Pediatric Infectious Disease Journal, 16(9), 842-846).

[0223] Patients presenting to medical clinics as outpatients often have clinical signs of SIRS including abnormal temperature, heart rate or respiratory rate and there are many causes of these clinical signs. Such patients need to be assessed thoroughly to determine the cause of the clinical signs because in some instances it could be a medical emergency. By way of example, a patient with colic might present with clinical signs of increased heart rate. Differential diagnoses could be (but not limited to) appendicitis, urolithiasis, cholecystitis, pancreatitis, enterocolitis. In each of these conditions it would be important to determine if there was a non-infectious systemic inflammatory response (inSIRS) or whether an infection was contributing to the systemic response. The treatment and management of patients with non-infectious systemic inflammation and/or SIRS due to infectious causes are different. The biomarkers detailed in this patent can differentiate an active herpesvirus infection from other causes of SIRS so that a medical practitioner can either rule in or rule out an active herpesvirus etiology. As a result, medical practitioners can more easily determine the next medical actions and procedure(s) to perform to satisfactorily resolve the patient issue.

### Diagnosing Maternal and Prenatal Cytomegalovirus Infection

[0224] Congenital CMV infection (transfer from mother to child) is the most common congenital viral condition in humans affecting between 20,000 and 40,000 children per year in the USA (Ross S A, Novak Z, Pati S, Boppana S B. Diagnosis of Cytomegalovirus Infections. Infectious disorders drug targets. 2011; 11(5):466-474). It is therefore important to determine whether a mother has suffered, or is suffering from a primary and active CMV infection during pregnancy. Current tests involve two consecutive maternal blood samples and the measurement of both IgM and IgG avidity. The presence of both IgM and IgG with low avidity indicates a more recent and primary CMV infection. Such tests have variable sensitivity with respect to determining whether CMV was transmitted to the fetus and depend upon when the blood samples were taken during gestation. The biomarkers outlined in the current application have utility in determining an active and primary CMV infection in mothers using a single blood sample and at the time of presenting clinical signs.

[0225] Perinatal testing for CMV currently involves the use of serological testing (IgM and IgG) and proof of absence of CMV shedding in the first two weeks of life using PCR. Such testing requires multiple samples over time and relies on assay sensitivity. The biomarkers outlined in the current application have utility in determining an active and primary CMV infection (or lack thereof) in neonates using a single blood sample.

### Detection of Active Herpesvirus Infection in the Immunocompromised

[0226] Primary infection with viruses and reactivation of latent viruses is common in patients that are immunocompromised, including those with prolonged sepsis and those on immunosuppressive therapy, and correct and timely diagnosis of a herpesvirus infection is important in such patients (Walton A H, Muenzer I T, Rasche D, Boomer I S, Sato B, et al. (2014) Reactivation of multiple viruses in patients with sepsis. PLoS ONE 9: e98819; Andersen, H. K., and E. S. Spencer. 1969. Cytomegalovirus infection among renal allograft recipients. Acta Med. Scand. 186:7-19; Bustamante C I, Wade J C (1991) Herpes simplex virus infection in the immunocompromised cancer patient. J Clin Oncol 9: 1903-1915; Ljungman P, Griffiths P, Paya C. Definitions of cytomegalovirus infection and disease in transplant recipients. Clin. Infect. Dis. 2002; 34(8):1094-1097).

[0227] For patients with sepsis (Walton et al., 2014), cytomegalovirus (CMV), Epstein-Barr (EBV), herpes-simplex (HSV), human herpesvirus-6 (HHV-6), and anellovirus TTV were all detectable in blood at higher rates compared to control patients, and those patients with detectable CMV had higher 90-day mortality. However, because these viruses have only been detected in sepsis patients it is not known whether reactivated latent viruses contribute to pathology, morbidity and mortality. Further, such viruses have a limited viremic period making detection of viral antigen in blood unreliable as a method of diagnosis.

[0228] Solid organ transplant recipients are commonly affected by herpesvirus infections, either as a primary infection, infection with a different herpesvirus strain, or re-activation of latent virus. Current serological tests are useful in determining that both the donor and recipient are negative for a herpesvirus infection (assuming that a herpesvirus infection is not incubating at the time the sample was taken). However, current serological tests are not useful in determining whether there is an active herpesvirus infection in the donor, and detection of virus antigen (PCR, virus antigen detection) in circulating blood or donor tissue is unreliable.

[0229] Patients with hemopoietic stem cell transplantation are also commonly affected by herpesvirus infections. Those patients most at risk are seronegative receiving a transplant from a positive donor. Currently such patients are monitored weekly for the presence of herpesvirus antigens but such tests rely on virus shedding, which is often late in the course of infection or transient. Donors are screened using serological tests or antigen detection tests but both methods can miss detecting an active infection.

[0230] HIV/AIDS patients are also commonly affected by herpesvirus infections, especially when they have low CD4-T cell counts. Again, such patients are currently tested for the presence of herpesvirus antigens but such tests rely on virus shedding, which is often late in the course of infection. Testing such patients for an active herpesvirus infection, which precedes active virus shedding into blood and tissues, would be a reliable method of determining whether a patient was suffering from a herpesvirus infection.

[0231] Thus, the biomarkers detailed in this patent can determine the presence of an active herpesvirus infection and could therefore be useful in monitoring immunocompromised patients, and screening tissue donors to; 1) detect the presence of an active herpesvirus infection early in the course of disease, and/or 2) determine the contribution to existing pathology and clinical signs of an active herpesvirus infection, and/or 3) to ensure that early and appropriate therapies can be administered.

### Determining the Extent of Systemic Inflammation in Patients with a HVaSIRS

[0232] Patients presenting to medical facilities often have any one of the four clinical signs of SIRS. However, many different conditions can present with one of the four clinical signs of SIRS and such patients need to be assessed to determine if they have inSIRS, and if so the extent of inSIRS, or HVaSIRS, and if so the extent of HVaSIRS, and to exclude other differential diagnoses.

[0233] By way of example, a patient presenting with abdominal colic could have any number of conditions, including (but not limited to): renal colic, appendicitis, peritonitis, cystitis, varicella zoster, food poisoning, hepatic colic, viral hepatitis, physical blockage. In this instance it would be important to determine if there was a systemic inflammatory response (inSIRS) or whether an infection (viral, bacterial, fungal or parasitic) was contributing to the condition. The treatment and management of patients with and without systemic inflammation and/or viral, bacterial, fungal or parasitic infections are different. Because the biomarkers described in this patent can determine the degree of systemic inflammatory involvement, the use of them will allow medical practitioners to determine the next medical procedure(s) to perform to satisfactorily resolve the patient issue. Patients with a physical blockage are unlikely to have a systemic inflammatory response and patients with renal or hepatic colic may have a large systemic inflammatory response but not likely due to an infection. The extent, or not, of HVaSIRS, as indicated by biomarkers presented in this patent, allows clinicians to definitively diagnosis a herpesvirus infection, or to rule out a herpesvirus cause, and provides clinicians with information to assist in treatment and patient management decision making. For example, a patient with abdominal colic and a fever and a strong marker response indicating HVaSIRS due to herpes zoster is likely to be hospitalised and to ensure that appropriate anti-herpesvirus therapy is administered.

### Antibiotic Stewardship

[0234] In patients suspected of having a systemic infection (viral, bacterial, fungal, parasitic) a clinical diagnosis and treatment regimen is provided by the physician(s) at the time the patient presents and often in the absence of any results from diagnostic tests. This is done in the interests of rapid treatment and positive patient outcomes. However, such an approach leads to over-prescribing of antibiotics irrespective of whether the patient has a microbial infection or not. Clinician diagnosis of BaSIRS is reasonably reliable (0.88) in children but only with respect to differentiating between patients ultimately shown to be blood culture positive and those that were judged to be unlikely to have an infection at the time antibiotics were administered (Fischer, J. E., Harbarth, S., Agthe, A. G., Benn, A., Ringer, S. A., Goldmann, D. A., & Fanconi, S. (2004). Quantifying uncertainty: physicians' estimates of infection in critically ill neonates and children. Clinical Infectious Diseases: An Official Publication of the Infectious Diseases Society of America, 38(10), 1383-1390). In Fischer et al., (2004), 54% of critically ill children were put on antibiotics during their hospital stay, of which only 14% and 16% had proven systemic bacterial infection or localized infection respectively. In this study, 53% of antibiotic treatment courses for critically ill children were for those that had an unlikely infection and 38% were antibiotic treatment courses for critically ill children as a rule-out treatment episode. Clearly, pediatric physicians err on the side of caution with respect to treating critically ill patients by placing all patients suspected of an infection on antibiotics—38% of all antibiotics used in critically ill children are used on the basis of ruling out BaSIRS, that is, are used as a precaution. Antibiotics are also widely prescribed and overused in adult patients as reported in Braykov et al., 2014 (Braykov, N. P., Morgan, D. J., Schweizer, M. L., Uslan, D. Z., Kelesidis, T., Weisenberg, S. A., et al. (2014). Assessment of empirical antibiotic therapy optimisation in six hospitals: an observational cohort study. The Lancet Infectious Diseases, 14(12), 1220-1227). In this study, across six US hospitals over four days in 2009 and 2010, 60% of all patients admitted received antibiotics. Of those patients prescribed antibiotics 30% were afebrile and had a normal white blood cell count and where therefore prescribed antibiotics as a precaution. As such, an assay that can accurately diagnose a herpesvirus infection in patients presenting with non-pathognomonic clinical signs of infection would be clinically useful and may lead to more appropriate use of antibiotics and anti-herpesvirus therapies.

### Differentiating Patients with a Viral Condition in Medical Clinics

[0235] Patients presenting to medical clinics as outpatients often have clinical signs of SIRS including abnormal temperature, heart rate or respiratory rate and there are many causes of these clinical signs. Such patients need to be assessed thoroughly to determine the cause of the clinical signs because in some instances it could be a medical emergency. By way of example, a patient with colic might present with clinical signs of increased heart rate. Differential diagnoses could be (but not limited to) appendicitis, urolithiasis, cholecystitis, pancreatitis, enterocolitis. In each of these conditions it would be important to determine if there was a non-infectious systemic inflammatory response (inSIRS) or whether an infection was contributing to the systemic response. The treatment and management of patients with non-infectious systemic inflammation and/or SIRS due to infectious causes are different. The HVaSIRS biomarkers detailed herein can differentiate a HVaSIRS from other causes of SIRS so that a medical practitioner can either rule in or rule out a systemic inflammation of herpesvirus etiology. As a result, medical practitioners can more easily determine the next medical actions and procedure(s) to perform to satisfactorily resolve the patient issue.

### Detection of Reactivation of Latent Viruses

[0236] Reactivation of latent viruses is common in patients that are immunocompromised, including those with prolonged sepsis and those on immunosuppressive therapy (Walton A H, Muenzer J T, Rasche D, Boomer J S, Sato B, et al. (2014) Reactivation of multiple viruses in patients with sepsis. PLoS ONE 9: e98819; Andersen, H. K., and E. S. Spencer. 1969. Cytomegalovirus infection among renal allograft recipients. Acta Med. Scand. 186:7-19; Bustamante C I, Wade J C (1991) Herpes simplex virus infection in the immunocompromised cancer patient. J Clin Oncol 9: 1903-1915). For patients with sepsis (Walton et al., 2014), cytomegalovirus (CMV), Epstein-Barr (EBV), herpes-simplex (HSV), human herpesvirus-6 (HHV-6), and anellovirus TTV were all detectable in blood at higher rates compared to control patients, and those patients with detectable CMV had higher 90-day mortality. However, because these viruses have only been detected in sepsis patients it is not known whether reactivated latent viruses contribute to pathology, morbidity and mortality.

### Example 8

### First Example Workflow for Determining Host Response

[0237] A first example workflow for measuring host response to HVaSIRS will now be described. The workflow involves a number of steps depending upon availability of automated platforms. The assay uses quantitative, real-time determination of the amount of each host immune cell RNA transcript in the sample based on the detection of fluorescence on a qRT-PCR instrument (e.g. Applied Biosystems 7500 Fast Dx Real-Time PCR Instrument, Applied Biosystems, Foster City, Calif., catalogue number 440685; K082562). Transcripts are each reverse-transcribed, amplified, detected, and quantified in a separate reaction well using a probe that is visualized in the FAM channel (by example). Such reactions can be run as single-plexes (one probe for one transcript per tube), multiplexed (multiple probes for multiple transcripts in one tube), one-step (reverse transcription and PCR are performed in the same tube), or two-step (reverse transcription and PCR performed as two separate reactions in two tubes). A score is calculated using interpretive software provided separately to the kit but designed to integrate with RT-PCR machines.

[0238] The workflow below describes the use of manual processing and a pre-prepared kit.

[0239] Pre-Analytical

[0240] Blood collection

[0241] Total RNA isolation

[0242] Analytical

[0243] Reverse transcription (generation of cDNA)

[0244] qPCR preparation

[0245] qPCR

[0246] Software, Interpretation of Results and Quality Control

[0247] Output.

[0248] Kit Contents

[0249] Diluent

[0250] RT Buffer

[0251] RT Enzyme Mix

[0252] qPCR Buffer

[0253] Primer/Probe Mix

[0254] AmpliTaq Gold® (or similar)

[0255] High Positive Control

[0256] Low Positive Control

[0257] Negative Control

[0258] Blood Collection

[0259] The specimen used is a 2.5 mL sample of blood collected by venipuncture using the PAXgene® collection tubes within the PAXgene® Blood RNA System (Qiagen, kit catalogue #762164; Becton Dickinson, Collection Tubes catalogue number 762165; K042613). An alternate collection tube is Tempus® (Life Technologies).

[0260] Total RNA Isolation

[0261] Blood (2.5 mL) collected into a PAXgene RNA tube is processed according to the manufacturer's instructions. Briefly, 2.5 mL sample of blood collected by venipuncture using the PAXgene™ collection tubes within the PAXgene™ Blood RNA System (Qiagen, kit catalogue #762164; Becton Dickinson, Collection Tubes catalogue number 762165; K042613). Total RNA isolation is performed using the procedures specified in the PAXgene™ Blood RNA kit (a component of the PAXgene™ Blood RNA System). The extracted RNA is then tested for purity and yield (for example by running an A_{260/280} ratio using a Nanodrop® (Thermo Scientific)) for which a minimum quality must be (ratio >1.6). RNA should be adjusted in concentration to allow for a constant input volume to the reverse transcription reaction (below). RNA should be processed immediately or stored in single-use volumes at or below −70° C. for later processing.

[0262] Reverse Transcription

[0263] Determine the appropriate number of reaction equivalents to be prepared (master mix formulation) based on a plate map and the information provided directly below. Each clinical specimen is run in singleton.

[0264] Each batch run desirably includes the following specimens:
[0265] High Control, Low Control, Negative Control, and No Template Control (Test Diluent instead of sample) in singleton each

[0266] Program the ABI 7500 Fast Dx Instrument as detailed below.
[0267] Launch the software.
[0268] Click Create New Document
[0269] In the New Document Wizard, select the following options:
   [0270] i. Assay: Standard Curve (Absolute Quantitation)
   [0271] ii. Container: 96-Well Clear
   [0272] iii. Template: Blank Document (or select a laboratory-defined template)
   [0273] iv. Run Mode: Standard 7500
   [0274] v. Operator: Enter operator's initials
   [0275] vi. Plate name: [default]
[0276] Click Finish
[0277] Select the Instrument tab in the upper left
[0278] In the Thermal Cycler Protocol area, Thermal Profile tab, enter the following times:
   [0279] i. 25° C. for 10 minutes
   [0280] ii. 45° C. for 45 minutes
   [0281] iii. 93° C. for 10 minutes
   [0282] iv. Hold at 25° C. for 60 minutes

[0283] In a template-free area, remove the test Diluent and RT-qPCR Test RT Buffer to room temperature to thaw. Leave the RT-qPCR Test RT Enzyme mix in the freezer and/or on a cold block.

[0284] In a template-free area, assemble the master mix in the order listed below.

[0285] RT Master Mix—Calculation:

| | Per well | ×N |
|---|---|---|
| RT-qPCR Test RT Buffer | 3.5 μL | 3.5 × N |
| RT-qPCR Test RT Enzyme mix | 1.5 μL | 1.5 × N |
| Total Volume | 5 μL | 5 × N |

[0286] Gently vortex the master mix then pulse spin. Add the appropriate volume (5 μL) of the RT Master Mix into each well at room temperature.

[0287] Remove clinical specimens and control RNAs to thaw. (If the specimens routinely take longer to thaw, this step may be moved upstream in the validated method.)

[0288] Vortex the clinical specimens and control RNAs, then pulse spin. Add 10 μL of control RNA or RT-qPCR Test Diluent to each respective control or negative well.

[0289] Add 10 μL of sample RNA to each respective sample well (150 ng total input for RT; OD₂₆₀/OD₂₈₀ ratio greater than 1.6). Add 10 μL of RT-qPCR Test Diluent to the respective NTC well.

[0290] Note: The final reaction volume per well is 15 μL.

| | Samples |
|---|---|
| RT Master Mix | 5 μL |
| RNA sample | 10 μL |
| Total Volume (per well) | 15 μL |

[0291] Mix by gentle pipetting. Avoid forming bubbles in the wells.

[0292] Cover wells with a seal.

[0293] Spin the plate to remove any bubbles (1 minute at 400×g).

[0294] Rapidly transfer to ABI 7500 Fast Dx Instrument pre-programmed as detailed above.

[0295] Click Start. Click Save and Continue. Before leaving the instrument, it is recommended to verify that the run started successfully by displaying a time under Estimated Time Remaining.

[0296] qPCR master mix may be prepared to coincide roughly with the end of the RT reaction. For example, start about 15 minutes before this time. See below.

[0297] When RT is complete (i.e. resting at 25° C.; stop the hold at any time before 60 minutes is complete), spin the plate to collect condensation (1 minute at 400×g).

[0298] qPCR Preparation

[0299] Determine the appropriate number of reaction equivalents to be prepared (master mix formulation) based on a plate map and the information provided in RT Preparation above.

[0300] Program the ABI 7500 Fast Dx with the settings below.
[0301] a) Launch the software.
[0302] b) Click Create New Document
[0303] c) In the New Document Wizard, select the following options:
   [0304] i. Assay: Standard Curve (Absolute Quantitation)
   [0305] ii. Container: 96-Well Clear
   [0306] iii. Template: Blank Document (or select a laboratory-defined template)
   [0307] iv. Run Mode: Standard 7500
   [0308] v. Operator: Enter operator's initials
   [0309] vi. Plate name: Enter desired file name
[0310] d) Click Next
[0311] e) In the Select Detectors dialog box:
   [0312] i. Select the detector for the first biomarker, and then click Add>>.
   [0313] ii. Select the detector second biomarker, and then click Add>>, etc.
   [0314] iii. Passive Reference: ROX
[0315] f) Click Next
[0316] g) Assign detectors to appropriate wells according to plate map.
   [0317] i. Highlight wells in which the first biomarker assay will be assigned
   [0318] ii. Click use for the first biomarker detector
   [0319] iii. Repeat the previous two steps for the other biomarkers
   [0320] iv. Click Finish
[0321] h) Ensure that the Setup and Plate tabs are selected
[0322] i) Select the Instrument tab in the upper left
[0323] j) In the Thermal Cycler Protocol area, Thermal Profile tab, perform the following actions, with the results shown in FIG. 9:
   [0324] i. Delete Stage 1 (unless this was completed in a laboratory-defined template).
   [0325] ii. Enter sample volume of 25 μL.
   [0326] iii. 95° C. 10 minutes
   [0327] iv. 40 cycles of 95° C. for 15 seconds, 63° C. for 1 minute
   [0328] v. Run Mode: Standard 7500
   [0329] vi. Collect data using the “stage 2, step 2 (63.0@1:00)” setting
[0330] k) Label the wells as below using this process: Right click over the plate map, then select Well Inspector. With the Well Inspector open, select a well or wells. Click back into the Well Inspector and enter the Sample Name. Close the Well Inspector when completed.
   [0331] i. CONH for High Control
   [0332] ii. CONL for Low Control
   [0333] iii. CONN for Negative Control
   [0334] iv. NTC for No Template Control
   [0335] v. [Accession ID] for clinical specimens
[0336] l) Ensure that detectors and quenchers are selected as listed below.
   [0337] i. FAM for CCL5 biomarker 1; quencher=none
   [0338] ii. FAM for FLNB biomarker 2; quencher=none
   [0339] iii. FAM for PPP2R2B; biomarker 3; quencher=none
   [0340] iv. FAM for GNG7; biomarker 4; quencher=none
   [0341] v. FAM for CASZ1; biomarker 5; quencher=none
   [0342] vi. FAM for VASH1; biomarker 6; quencher=none
   [0343] vii. Select “ROX” for passive reference

[0344] qPCR

[0345] In a template-free area, remove the assay qPCR Buffer and assay Primer/Probe Mixes for each target to room temperature to thaw. Leave the assay AmpliTaq Gold in the freezer and/or on a cold block.

[0346] Still in a template-free area, prepare qPCR Master Mixes for each target in the listed order at room temperature.

[0347] qPCR Master Mixes—Calculation Per Sample

| | Per well | ×N |
|---|---|---|
| qPCR Buffer | 11 μL | 11 × N |
| Primer/Probe Mix | 3.4 μL | 3.4 × N |
| AmpliTaq Gold ® | 0.6 μL | 0.6 × N |
| Total Volume | 15 μL | 15 × N |

[0348] Example forward (F) and reverse (R) primers and probes (P) and their final reaction concentration for measuring four host response transcripts to viral biomarkers are contained in the following table (F, forward; R, reverse; P, probe).

| | | Reaction |
|---|---|---|
| Reagent | 5′-3′ Sequence | mM |
| CCL5-F | GGCTGAACAAGGGCAAGCT | 360 |
| CCL5-R | ACTCCCGAACCCATTTCTTCTC | 360 |
| CCL5-P | GTCACCCGAAAGAACCGC | 50 |
| FLNB-F | GCCCACCACATCGTGGGC | 360 |
| FLNB-R | GGTCAGTCACTCCACCAGGATGG | 360 |
| FLNB-P | GCCCTGGCTCAGCCAACG | 50 |
| PPP2R2B-F | GTCCGCTGATGACCTGAGG | 360 |
| PPP2R2B-R | CGTGAGCTCCTCCATGTTGG | 360 |
| PPP2R2B-P | GTTTTAATATTGTGGACATTAAGCCAG | 50 |
| GNG7-F | GCAAGCTGTGATTCCTGGG | 360 |
| GNG7-R | CCACCAGCTTCCGGGCCT | 360 |
| GNG7-P | GGGGCCCAGAGCTGATG | 50 |
| CASZ1 | CTCCCAGGACCGCAGTCTA | 360 |
| CASZ1 | ACCTGACTGTGAAGGAGCCC | 360 |
| CASZ1 | ATGAATTTGCCGGGACTGC | 50 |
| VASH1 | CTCCCTCTCCCACCAAGGA | 360 |
| VASH1 | CCCGTTAAGGTCTGGCATG | 360 |
| VASH1 | GCAGGAACAGCCGCAGTG | 50 |

[0349] Gently mix the master mixes by flicking or by vortexing, and then pulse spin. Add 15 μL of qPCR Master Mix to each well at room temperature.

[0350] In a template area, add 130 μL of SeptiCyte Lab Test Diluent to each cDNA product from the RT Reaction. Reseal the plate tightly and vortex the plate to mix thoroughly.

[0351] Add 10 μL of diluted cDNA product to each well according to the plate layout.

[0352] Mix by gentle pipetting. Avoid forming bubbles in the wells.

[0353] Cover wells with an optical seal.

[0354] Spin the plate to remove any bubbles (1 minute at 400×g).

[0355] Place on real-time thermal cycler pre-programmed with the settings above.

[0356] Click Start. Click Save and Continue. Before leaving the instrument, it is recommended to verify that the run started successfully by displaying a time under Estimated Time Remaining.

[0357] Note: Do not open the qPCR plate at any point after amplification has begun. When amplification has completed, discard the unopened plate.

[0358] Software, Interpretation of Results and Quality Control

[0359] Software is specifically designed to integrate with the output of PCR machines and to apply an algorithm based on the use of multiple biomarkers. The software takes into account appropriate controls and reports results in a desired format.

[0360] When the run has completed on the ABI 7500 Fast Dx Instrument, complete the steps below in the application 7500 Fast System with 21 CFR Part 11 Software, ABI software SDS v1.4.

[0361] Click on the Results tab in the upper left corner.

[0362] Click on the Amplification Plot tab in the upper left corner.

[0363] In the Analysis Settings area, select an auto baseline and manual threshold for all targets. Enter 0.01 as the threshold.

[0364] Click on the Analyse button on the right in the Analysis Settings area.

[0365] From the menu bar in the upper left, select File then Close.

[0366] Complete the form in the dialog box that requests a reason for the change. Click OK.

[0367] Transfer the data file (.sds) to a separate computer running the specific assay RT-q PCR Test Software.

[0368] Launch the assay RT-qPCR Test Software. Log in.

[0369] From the menu bar in the upper left, select File then Open.

[0370] Browse to the location of the transferred data file (.sds). Click OK.

[0371] The data file will then be analysed using the assay's software application for interpretation of results.

[0372] Interpretation of Results and Quality Control

[0373] Results

[0374] Launch the interpretation software. Software application instructions are provided separately.

[0375] Following upload of the .sds file, the Software will automatically generate classifier scores for controls and clinical specimens.

[0376] Controls

[0377] The Software compares each CON (control) specimen (CONH, CONL, CONN) to its expected result. The controls are run in singleton.

| Control specimen | | |
|---|---|---|
| Designation | Name | Expected result |
| CONH | High Control | Score range |
| CONL | Low Control | Score range |
| CONN | Negative Control | Score range |
| NTC | No Template Control | Fail (no Ct for all targets) |

[0378] If CONH, CONL, and/or CONN fail the batch run is invalid and no data will be reported for the clinical specimens. This determination is made automatically by the interpretive software. The batch run should be repeated starting with either a new RNA preparation or starting at the RT reaction step.

[0379] If NTC yields a result other than Fail (no Ct for all targets), the batch run is invalid and no data may be reported for the clinical specimens. This determination is made by visual inspection of the run data. The batch run should be repeated starting with either a new RNA preparation or starting at the RT reaction step.

[0380] If a second batch run fails, please contact technical services. If both the calibrations and all controls are valid, then the batch run is valid and specimen results will be reported.

[0381] Specimens

[0382] Note that a valid batch run may contain both valid and invalid specimen results.

[0383] Analytical criteria (e.g. Ct values) that qualify each specimen as passing or failing (using pre-determined data) are called automatically by the software.

[0384] Scores out of range—reported.

[0385] Quality Control

[0386] Singletons each of the Negative Control, Low Positive Control, and High Positive Control must be included in each batch run. The batch is valid if no flags appear for any of these controls.

[0387] A singleton of the No Template Control is included in each batch run and Fail (no Ct for all targets) is a valid result indicating no amplifiable material was detectable in the well.

[0388] The negative control must yield a Negative result. If the negative control is flagged as Invalid, then the entire batch run is invalid.

[0389] The low positive and high positive controls must fall within the assigned ranges. If one or both of the positive controls are flagged as Invalid, then the entire batch run is invalid.

### Example 9

### Example Output

[0390] A possible example output from the software for a HVaSIRS assay is presented in FIG. 9. The format of such a report depends on many factors including; quality control, regulatory authorities, cut-off values, the algorithm used, laboratory and clinician requirements, likelihood of misinterpretation.

[0391] In this instance the assay is called “SeptiCyte Herpes”. The result is reported as a number (6), a position on a 0-10 scale, and a probability of the patient having a HVaSIRS based on historical results and the use of a pre-determined cut-off (using results from clinical studies). Results of controls within the assay may also be reported. Other information that could be reported might include: previous results and date and time of such results, a prognosis, a scale that provides cut-off values for historical testing results that separate the conditions of healthy, inSIRS and HVaSIRS such that those patients with higher scores are considered to have more severe HVaSIRS.

### Example 11

### Second Example Workflow

[0392] A second example workflow will now be described. Machines have been, and are being, developed that are capable of processing a patient sample at point-of-care, or near point-of-care. Such machines require few molecular biology skills to run and are aimed at non-technical users. The idea is that the sample would be pipetted directly into a disposable cartridge(s) that is/are then inserted into the machine. For determining a specific host response, the cartridge will need to extract high quality RNA from the cells in the sample for use in reverse transcription followed by RT-PCR. The machines are designed for minimum user interaction such that the user presses “Start” and within 1-3 hours results are generated. The cartridges contain all of the required reagents to perform host cell nucleic acid extraction (RNA), reverse transcription, and qRT-PCR, and the machine has appropriate software incorporated to allow use of algorithms to interpret each result and combine results, and final interpretation and printing of results.

[0393] Fresh, whole, anti-coagulated blood can be pipetted into a specialized cartridge (e.g. cartridges designed for Enigma ML machine by Enigma Diagnostics Limited (Enigma Diagnostics Limited, Building 224, Tetricus Science Park, Dstl, Porton Down, Salisbury, Wiltshire SP4 0JQ) or similar (Unyvero, Curetis AG, Max-Eyth-Str. 42 71088 Holzgerlingen, Germany)), and on-screen instructions followed to test for differentiating a HVaSIRS from other forms of SIRS. Inside the machine RNA is first extracted from the whole blood and is then converted into cDNA. The cDNA is then used in qRT-PCR reactions. The reactions are followed in real time and Ct values calculated. On-board software generates a result output (see, FIG. 9). Appropriate quality control measures for RNA quality, no template controls, high and low template controls and expected Ct ranges ensure that results are not reported erroneously.

### Example 11

### Example Algorithm Combining Derived Biomarkers for Assessing a HVaSIRS

[0394] Derived biomarkers can be used in combination to increase the diagnostic power for separating various conditions. Determining which markers to use, and how many, for separating various conditions can be achieved by calculating Area Under Curve (AUC).

[0395] As such, and by example, a 6-HVaSIRS polynucleotide biomarker profile (AUC 0.947) offers the appropriate balance between simplicity, practicality and commercial risk for diagnosing HVaSIRS. Further, an equation using six biomarkers weighs each biomarker equally which also provides additional robustness in cases of analytical or clinical variability.

[0396] One example equation (amongst others) that provides good diagnostic power for diagnosing a HVaSIRS is:

Diagnostic Score=(CCL5−FLNB)+(PPP2R2B−GNG7)+(CASZ1−VASH1)

[0397] Note: each biomarker in the Diagnostic Score above is the Log 2 transformed concentration of the marker in the sample and biomarkers are oriented so that cases (HVaSIRS) are high and controls are low. Change of orientation of biomarkers in a derived biomarker does not affect diagnostic performance—rather it is the specific combination that generates diagnostic performance.

[0398] The disclosure of every patent, patent application, and publication cited herein is hereby incorporated herein by reference in its entirety.

[0399] The citation of any reference herein should not be construed as an admission that such reference is available as “Prior Art” to the instant application.

[0400] Throughout the specification the aim has been to describe the preferred embodiments of the invention without limiting the invention to any one embodiment or specific collection of features. Those of skill in the art will therefore appreciate that, in light of the instant disclosure, various modifications and changes can be made in the particular embodiments exemplified without departing from the scope of the present invention. All such modifications and changes are intended to be included within the scope of the appended claims.

### TABLES

TABLE 1
DATASET USED FOR “DISCOVERY”
OF HERPESVIRUS SIGNATURES

| Dataset | Virus | |
|---|---|---|
| Identifier | name | Study Description, Sample Comparison |
| GSE40366 | CMV | Human patients, single sample. |
| | | Study designed to determine peripheral blood |
| | | gene expression differences between old and |
| | | young humans (nonagenerians vs less than 30 |
| | | years of age). CMV titers were also determined |
| | | as part of the study. |
| | | Samples from any subject with |
| | | no CMV titer (0) were compared to those with a |
| | | CMV titer > 20,000. |

TABLE 2
DATASETS USED TO IDENTIFY BIOMARKERS ASSOCIATED
WITH NON-HERPES AND NON-VIRAL INFLAMMATION

| Dataset Identifier | Condition | Study Description |
|---|---|---|
| GSE52428 | Influenza virus | 18 human subjects experimentally-infected with |
| | | Influenza virus A (two strains). Samples taken |
| | | pre-infection and every eight hours out to 108 |
| | | hours post-infection. Symptomatic and |
| | | asymptomatic responses. |
| GSE41752 | Lassa virus | 11 macaques with experimentally-induced Lassa |
| | | virus infection. Samples collected pre-infection |
| | | and on Days 2, 3, 6, 8, 10 and 12 post-infection. |
| | | Total 46 processed samples. |
| GSE33341 | Bacteremia; | Human patients and subjects, single time point. |
| | Staphylocccus aurues or | Staphylococcus aureus: 34 |
| | Escherichia coli | Escherichia coli: 15 |
| | | Healthy: 43 |
| GSE40366 | Age | 143 nonagenerians and 30 young subjects. |
| | | Comparison of those subjects without CMV titers. |
| GSE42834 | Tuberculosis | Human subjects, single time point. |
| | Sarcoidosis | Tuberculosis: 66 |
| | Lung cancer | Sarcoidosis (active, 68; non-active, 22) |
| | Pneumonia | Lung cancer: 16 |
| | | Pneumonia: 16 |
| | | Control: 147 |
| GSE25504 | Neonatal sepsis | Human subjects, single time point. |
| | | Sepsis: 28 |
| | | Controls: 35 |
| GSE17755 | Autoimmune disease | Human subjects, single time point. |
| | | Rheumatoid arthritis: 112 |
| | | Systemic Lupus Erythematosis: 22 |
| | | Poly juvenile idiopathic arthritis: 6 |
| | | Systemic juvenile idiopathic arthritis: 51 |
| | | Healthy: 53 |
| GSE35846 | Race, age, gender, | Human patients, single sample. |
| | obesity | 189 subjects. |
| | | 65 men and 124 women. |
| | | Aged 26 and 79 (mean 51). |
| | | 140 Caucasian, 37 African |
| | | American, 11 Asian, |
| | | 1 American Indian. |

TABLE 3
DATASETS USED FOR “VALIDATION” OF HERPESVIRUS SIGNATURES

| Dataset Identifier | Virus names | Study Description |
|---|---|---|
| GSE40366 | CMV_Age | Human patients, single sample. |
| | | Study designed to determine peripheral blood |
| | | gene expression differences between old and |
| | | young humans (nonagenerians vs less than 30 |
| | | years of age). CMV titers were also determined |
| | | as part of the study. |
| | | Samples from nonagenerians with no CMV titer |
| | | (0) were compared to young subjects with no |
| | | CMV titer. |
| GSE45919 | EBV | Human patients, three samples at three time |
| | | points; before, during and convalescent. |
| | | Study designed to identify what gene expression |
| | | changes occur over time with a primary EBV |
| | | infection. |
| | | Samples from patients prior to EBV infection (9) |
| | | were compared to those samples taken during a |
| | | primary infection (3). |
| GSE40396 | HHV6 | Human patients, single sample. |
| | | Study designed to identify peripheral blood gene |
| | | expression signatures associated with either a |
| | | viral or bacterial infection. |
| | | Samples from patients with HHV6 (10) were |
| | | compared to healthy control subjects (19). |
| MARS | CMV | Human patients, single time point. |
| | EBV | Study designed to validate a gene expression |
| | HSV1 and 2 | signature for differentiating SIRS and sepsis. |
| | | Samples from patients where a potential herpes |
| | | virus infection had been determined - either by |
| | | determination of plasma IgM/IgG or direct PCR. |

TABLE 4
GREEDY ADDITION RESULTS FOR EACH OF THE
NORMALIZED AND SCALED RATIOS ACROSS ALL
POSITIVE AND NEGATIVE DATASETS

| | Greedy ratio | AUC | AUC | |
|---|---|---|---|---|
| | addition | positive | negative | Difference |
| 1 | CCL5_FLNB | 0.864 | 0.500 | 0.364 |
| 2 | PPP2R2B_GNG7 | 0.914 | 0.514 | 0.401 |
| 3 | CASZ1_VASH1 | 0.947 | 0.530 | 0.417 |
| 4 | GFI1_RPL30 | 0.960 | 0.539 | 0.421 |
| 5 | CHST12_TMC6 | 0.966 | 0.535 | 0.431 |
| 6 | ADRB2_RALA | 0.963 | 0.533 | 0.431 |
| 7 | SYNE2_BACH2 | 0.963 | 0.541 | 0.422 |
| 8 | CD8A_RPS5 | 0.962 | 0.549 | 0.413 |
| 9 | FAM129A_SPINT2 | 0.966 | 0.561 | 0.405 |
| 10 | TGFBR3_ETS1 | 0.965 | 0.567 | 0.398 |

TABLE 5
PERFORMANCE (AUC) OF THE 452 DERIVED BIOMARKERS ACROSS THE NEGATIVE* AND POSITIVE¹ VALIDATION
DATASETS TO INCLUDE THE MEAN FOR ALL NINE NEGATIVE DATASETS AND FIVE POSITIVE DATASETS

| | | | | | | | | | | | | | | | | | Mean |
|---|---|---|---|---|---|---|---|---|---|---|---|---|---|---|---|---|---|
| | | | | | | | | | | | | | | | | | Dif- |
| Derived | Negative Validation Datasets* | | | | | | | | | | Positive Validation Datasets (1) | | | | | | fer- |
| Biomarker | 1 | 2 | 3 | 4 | 5 | 6 | 7 | 8 | 9 | Mean | 1 | 2 | 3 | 4 | 5 | Mean | ence |
| BACH2_GDPD5 | 0.54 | 0.80 | 0.51 | 0.53 | 0.79 | 0.66 | 0.71 | 0.52 | 0.65 | 0.63 | 0.85 | 0.81 | 0.93 | 0.96 | 0.87 | 0.88 | 0.25 |
| CAMK1D_OASL | 0.54 | 0.80 | 0.51 | 0.53 | 0.79 | 0.66 | 0.71 | 0.52 | 0.65 | 0.63 | 0.85 | 0.81 | 0.93 | 0.96 | 0.87 | 0.88 | 0.25 |
| CCR7_CCL5 | 0.54 | 0.80 | 0.51 | 0.53 | 0.79 | 0.66 | 0.71 | 0.52 | 0.65 | 0.63 | 0.85 | 0.81 | 0.93 | 0.96 | 0.87 | 0.88 | 0.25 |
| CCR7_OASL | 0.54 | 0.80 | 0.51 | 0.53 | 0.79 | 0.66 | 0.71 | 0.52 | 0.65 | 0.63 | 0.85 | 0.81 | 0.93 | 0.96 | 0.87 | 0.88 | 0.25 |
| CCR7_PPP2R2B | 0.54 | 0.80 | 0.51 | 0.53 | 0.79 | 0.66 | 0.71 | 0.52 | 0.65 | 0.63 | 0.85 | 0.81 | 0.93 | 0.96 | 0.87 | 0.88 | 0.25 |
| CD79A_OASL | 0.54 | 0.80 | 0.51 | 0.53 | 0.79 | 0.66 | 0.71 | 0.52 | 0.65 | 0.63 | 0.85 | 0.81 | 0.93 | 0.96 | 0.87 | 0.88 | 0.25 |
| CRY2_CCL5 | 0.54 | 0.80 | 0.51 | 0.53 | 0.79 | 0.66 | 0.71 | 0.52 | 0.65 | 0.63 | 0.85 | 0.81 | 0.93 | 0.96 | 0.87 | 0.88 | 0.25 |
| DHRS3_PPP2R2B | 0.54 | 0.80 | 0.51 | 0.53 | 0.79 | 0.66 | 0.71 | 0.52 | 0.65 | 0.63 | 0.85 | 0.81 | 0.93 | 0.96 | 0.87 | 0.88 | 0.25 |
| DPEP2_FAM129A | 0.54 | 0.80 | 0.51 | 0.53 | 0.79 | 0.66 | 0.71 | 0.52 | 0.65 | 0.63 | 0.85 | 0.81 | 0.93 | 0.96 | 0.87 | 0.88 | 0.25 |
| EIF2S3_OASL | 0.54 | 0.80 | 0.51 | 0.53 | 0.79 | 0.66 | 0.71 | 0.52 | 0.65 | 0.63 | 0.85 | 0.81 | 0.93 | 0.96 | 0.87 | 0.88 | 0.25 |
| EPHX2_CASZ1 | 0.54 | 0.80 | 0.51 | 0.53 | 0.79 | 0.66 | 0.71 | 0.52 | 0.65 | 0.63 | 0.85 | 0.81 | 0.93 | 0.96 | 0.87 | 0.88 | 0.25 |
| EPHX2_CD8A | 0.54 | 0.80 | 0.51 | 0.53 | 0.79 | 0.66 | 0.71 | 0.52 | 0.65 | 0.63 | 0.85 | 0.81 | 0.93 | 0.96 | 0.87 | 0.88 | 0.25 |
| EPHX2_HERC6 | 0.54 | 0.80 | 0.51 | 0.53 | 0.79 | 0.66 | 0.71 | 0.52 | 0.65 | 0.63 | 0.85 | 0.81 | 0.93 | 0.96 | 0.87 | 0.88 | 0.25 |
| EPHX2_KPNB1 | 0.54 | 0.80 | 0.51 | 0.53 | 0.79 | 0.66 | 0.71 | 0.52 | 0.65 | 0.63 | 0.85 | 0.81 | 0.93 | 0.96 | 0.87 | 0.88 | 0.25 |
| EPHX2_SLAMF7 | 0.54 | 0.80 | 0.51 | 0.53 | 0.79 | 0.66 | 0.71 | 0.52 | 0.65 | 0.63 | 0.85 | 0.81 | 0.93 | 0.96 | 0.87 | 0.88 | 0.25 |
| FLNB_DNPEP | 0.54 | 0.80 | 0.51 | 0.53 | 0.79 | 0.66 | 0.71 | 0.52 | 0.65 | 0.63 | 0.85 | 0.81 | 0.93 | 0.96 | 0.87 | 0.88 | 0.25 |
| FLNB_EIF2AK2 | 0.54 | 0.80 | 0.51 | 0.53 | 0.79 | 0.66 | 0.71 | 0.52 | 0.65 | 0.63 | 0.85 | 0.81 | 0.93 | 0.96 | 0.87 | 0.88 | 0.25 |
| FLNB_FDFT1 | 0.54 | 0.80 | 0.51 | 0.53 | 0.79 | 0.66 | 0.71 | 0.52 | 0.65 | 0.63 | 0.85 | 0.81 | 0.93 | 0.96 | 0.87 | 0.88 | 0.25 |
| FLNB_GZMA | 0.54 | 0.80 | 0.51 | 0.53 | 0.79 | 0.66 | 0.71 | 0.52 | 0.65 | 0.63 | 0.85 | 0.81 | 0.93 | 0.96 | 0.87 | 0.88 | 0.25 |
| FLNB_IFITM1 | 0.54 | 0.80 | 0.51 | 0.53 | 0.79 | 0.66 | 0.71 | 0.52 | 0.65 | 0.63 | 0.85 | 0.81 | 0.93 | 0.96 | 0.87 | 0.88 | 0.25 |
| FLNB_PPP2R2B | 0.54 | 0.80 | 0.51 | 0.53 | 0.79 | 0.66 | 0.71 | 0.52 | 0.65 | 0.63 | 0.85 | 0.81 | 0.93 | 0.96 | 0.87 | 0.88 | 0.25 |
| FLNB_RARRES3 | 0.54 | 0.80 | 0.51 | 0.53 | 0.79 | 0.66 | 0.71 | 0.52 | 0.65 | 0.63 | 0.85 | 0.81 | 0.93 | 0.96 | 0.87 | 0.88 | 0.25 |
| FLNB_TBK1 | 0.54 | 0.80 | 0.51 | 0.53 | 0.79 | 0.66 | 0.71 | 0.52 | 0.65 | 0.63 | 0.85 | 0.81 | 0.93 | 0.96 | 0.87 | 0.88 | 0.25 |
| FLNB_UBR2 | 0.54 | 0.80 | 0.51 | 0.53 | 0.79 | 0.66 | 0.71 | 0.52 | 0.65 | 0.63 | 0.85 | 0.81 | 0.93 | 0.96 | 0.87 | 0.88 | 0.25 |
| FLNB_ZBP1 | 0.54 | 0.80 | 0.51 | 0.53 | 0.79 | 0.66 | 0.71 | 0.52 | 0.65 | 0.63 | 0.85 | 0.81 | 0.93 | 0.96 | 0.87 | 0.88 | 0.25 |
| FLT3LG_OASL | 0.54 | 0.80 | 0.51 | 0.53 | 0.79 | 0.66 | 0.71 | 0.52 | 0.65 | 0.63 | 0.85 | 0.81 | 0.93 | 0.96 | 0.87 | 0.88 | 0.25 |
| GNG7_BTG3 | 0.54 | 0.80 | 0.51 | 0.53 | 0.79 | 0.66 | 0.71 | 0.52 | 0.65 | 0.63 | 0.85 | 0.81 | 0.93 | 0.96 | 0.87 | 0.88 | 0.25 |
| GNG7_IFI44 | 0.54 | 0.80 | 0.51 | 0.53 | 0.79 | 0.66 | 0.71 | 0.52 | 0.65 | 0.63 | 0.85 | 0.81 | 0.93 | 0.96 | 0.87 | 0.88 | 0.25 |
| GNG7_TAP1 | 0.54 | 0.80 | 0.51 | 0.53 | 0.79 | 0.66 | 0.71 | 0.52 | 0.65 | 0.63 | 0.85 | 0.81 | 0.93 | 0.96 | 0.87 | 0.88 | 0.25 |
| ITM2C_GFI1 | 0.54 | 0.80 | 0.51 | 0.53 | 0.79 | 0.66 | 0.71 | 0.52 | 0.65 | 0.63 | 0.85 | 0.81 | 0.93 | 0.96 | 0.87 | 0.88 | 0.25 |
| ITM2C_PPP2R2B | 0.54 | 0.80 | 0.51 | 0.53 | 0.79 | 0.66 | 0.71 | 0.52 | 0.65 | 0.63 | 0.85 | 0.81 | 0.93 | 0.96 | 0.87 | 0.88 | 0.25 |
| LAMA5_OASL | 0.54 | 0.80 | 0.51 | 0.53 | 0.79 | 0.66 | 0.71 | 0.52 | 0.65 | 0.63 | 0.85 | 0.81 | 0.93 | 0.96 | 0.87 | 0.88 | 0.25 |
| LDLRAP1_OASL | 0.54 | 0.80 | 0.51 | 0.53 | 0.79 | 0.66 | 0.71 | 0.52 | 0.65 | 0.63 | 0.85 | 0.81 | 0.93 | 0.96 | 0.87 | 0.88 | 0.25 |
| LEF1_BTG3 | 0.54 | 0.80 | 0.51 | 0.53 | 0.79 | 0.66 | 0.71 | 0.52 | 0.65 | 0.63 | 0.85 | 0.81 | 0.93 | 0.96 | 0.87 | 0.88 | 0.25 |
| LEF1_CD8A | 0.54 | 0.80 | 0.51 | 0.53 | 0.79 | 0.66 | 0.71 | 0.52 | 0.65 | 0.63 | 0.85 | 0.81 | 0.93 | 0.96 | 0.87 | 0.88 | 0.25 |
| LEF1_CYB561 | 0.54 | 0.80 | 0.51 | 0.53 | 0.79 | 0.66 | 0.71 | 0.52 | 0.65 | 0.63 | 0.85 | 0.81 | 0.93 | 0.96 | 0.87 | 0.88 | 0.25 |
| LEF1_PPP2R2B | 0.54 | 0.80 | 0.51 | 0.53 | 0.79 | 0.66 | 0.71 | 0.52 | 0.65 | 0.63 | 0.85 | 0.81 | 0.93 | 0.96 | 0.87 | 0.88 | 0.25 |
| MAL_ZBP1 | 0.54 | 0.80 | 0.51 | 0.53 | 0.79 | 0.66 | 0.71 | 0.52 | 0.65 | 0.63 | 0.85 | 0.81 | 0.93 | 0.96 | 0.87 | 0.88 | 0.25 |
| NACA_ARSB | 0.54 | 0.80 | 0.51 | 0.53 | 0.79 | 0.66 | 0.71 | 0.52 | 0.65 | 0.63 | 0.85 | 0.81 | 0.93 | 0.96 | 0.87 | 0.88 | 0.25 |
| NACA_CD300A | 0.54 | 0.80 | 0.51 | 0.53 | 0.79 | 0.66 | 0.71 | 0.52 | 0.65 | 0.63 | 0.85 | 0.81 | 0.93 | 0.96 | 0.87 | 0.88 | 0.25 |
| NACA_SLAMF7 | 0.54 | 0.80 | 0.51 | 0.53 | 0.79 | 0.66 | 0.71 | 0.52 | 0.65 | 0.63 | 0.85 | 0.81 | 0.93 | 0.96 | 0.87 | 0.88 | 0.25 |
| NOSIP_CST7 | 0.54 | 0.80 | 0.51 | 0.53 | 0.79 | 0.66 | 0.71 | 0.52 | 0.65 | 0.63 | 0.85 | 0.81 | 0.93 | 0.96 | 0.87 | 0.88 | 0.25 |
| NOSIP_ZBP1 | 0.54 | 0.80 | 0.51 | 0.53 | 0.79 | 0.66 | 0.71 | 0.52 | 0.65 | 0.63 | 0.85 | 0.81 | 0.93 | 0.96 | 0.87 | 0.88 | 0.25 |
| PEX11B_PPP2R2B | 0.54 | 0.80 | 0.51 | 0.53 | 0.79 | 0.66 | 0.71 | 0.52 | 0.65 | 0.63 | 0.85 | 0.81 | 0.93 | 0.96 | 0.87 | 0.88 | 0.25 |
| PFKL_OASL | 0.54 | 0.80 | 0.51 | 0.53 | 0.79 | 0.66 | 0.71 | 0.52 | 0.65 | 0.63 | 0.85 | 0.81 | 0.93 | 0.96 | 0.87 | 0.88 | 0.25 |
| PIK3IP1_GFI1 | 0.54 | 0.80 | 0.51 | 0.53 | 0.79 | 0.66 | 0.71 | 0.52 | 0.65 | 0.63 | 0.85 | 0.81 | 0.93 | 0.96 | 0.87 | 0.88 | 0.25 |
| RALA_TPST2 | 0.54 | 0.80 | 0.51 | 0.53 | 0.79 | 0.66 | 0.71 | 0.52 | 0.65 | 0.63 | 0.85 | 0.81 | 0.93 | 0.96 | 0.87 | 0.88 | 0.25 |
| RPAIN_TPST2 | 0.54 | 0.80 | 0.51 | 0.53 | 0.79 | 0.66 | 0.71 | 0.52 | 0.65 | 0.63 | 0.85 | 0.81 | 0.93 | 0.96 | 0.87 | 0.88 | 0.25 |
| RPL22_CCL5 | 0.54 | 0.80 | 0.51 | 0.53 | 0.79 | 0.66 | 0.71 | 0.52 | 0.65 | 0.63 | 0.85 | 0.81 | 0.93 | 0.96 | 0.87 | 0.88 | 0.25 |
| RPL22_GALNT10 | 0.54 | 0.80 | 0.51 | 0.53 | 0.79 | 0.66 | 0.71 | 0.52 | 0.65 | 0.63 | 0.85 | 0.81 | 0.93 | 0.96 | 0.87 | 0.88 | 0.25 |
| RPL22_PPP2R2B | 0.54 | 0.80 | 0.51 | 0.53 | 0.79 | 0.66 | 0.71 | 0.52 | 0.65 | 0.63 | 0.85 | 0.81 | 0.93 | 0.96 | 0.87 | 0.88 | 0.25 |
| RPL22_SYT11 | 0.54 | 0.80 | 0.51 | 0.53 | 0.79 | 0.66 | 0.71 | 0.52 | 0.65 | 0.63 | 0.85 | 0.81 | 0.93 | 0.96 | 0.87 | 0.88 | 0.25 |
| RPL22_TGFBR3 | 0.54 | 0.80 | 0.51 | 0.53 | 0.79 | 0.66 | 0.71 | 0.52 | 0.65 | 0.63 | 0.85 | 0.81 | 0.93 | 0.96 | 0.87 | 0.88 | 0.25 |
| RPS5_CD8A | 0.54 | 0.80 | 0.51 | 0.53 | 0.79 | 0.66 | 0.71 | 0.52 | 0.65 | 0.63 | 0.85 | 0.81 | 0.93 | 0.96 | 0.87 | 0.88 | 0.25 |
| SERPINE2_OASL | 0.54 | 0.80 | 0.51 | 0.53 | 0.79 | 0.66 | 0.71 | 0.52 | 0.65 | 0.63 | 0.85 | 0.81 | 0.93 | 0.96 | 0.87 | 0.88 | 0.25 |
| SERPINE2_PPP2R2B | 0.54 | 0.80 | 0.51 | 0.53 | 0.79 | 0.66 | 0.71 | 0.52 | 0.65 | 0.63 | 0.85 | 0.81 | 0.93 | 0.96 | 0.87 | 0.88 | 0.25 |
| SPINT2_SQRDL | 0.54 | 0.80 | 0.51 | 0.53 | 0.79 | 0.66 | 0.71 | 0.52 | 0.65 | 0.63 | 0.85 | 0.81 | 0.93 | 0.96 | 0.87 | 0.88 | 0.25 |
| SREBF1_OASL | 0.54 | 0.80 | 0.51 | 0.53 | 0.79 | 0.66 | 0.71 | 0.52 | 0.65 | 0.63 | 0.85 | 0.81 | 0.93 | 0.96 | 0.87 | 0.88 | 0.25 |
| SYPL1_CASP4 | 0.54 | 0.80 | 0.51 | 0.53 | 0.79 | 0.66 | 0.71 | 0.52 | 0.65 | 0.63 | 0.85 | 0.81 | 0.93 | 0.96 | 0.87 | 0.88 | 0.25 |
| SYPL1_FAM129A | 0.54 | 0.80 | 0.51 | 0.53 | 0.79 | 0.66 | 0.71 | 0.52 | 0.65 | 0.63 | 0.85 | 0.81 | 0.93 | 0.96 | 0.87 | 0.88 | 0.25 |
| TCL1A_GFI1 | 0.54 | 0.80 | 0.51 | 0.53 | 0.79 | 0.66 | 0.71 | 0.52 | 0.65 | 0.63 | 0.85 | 0.81 | 0.93 | 0.96 | 0.87 | 0.88 | 0.25 |
| TMEM134_OASL | 0.54 | 0.80 | 0.51 | 0.53 | 0.79 | 0.66 | 0.71 | 0.52 | 0.65 | 0.63 | 0.85 | 0.81 | 0.93 | 0.96 | 0.87 | 0.88 | 0.25 |
| TMEM39B_OASL | 0.54 | 0.80 | 0.51 | 0.53 | 0.79 | 0.66 | 0.71 | 0.52 | 0.65 | 0.63 | 0.85 | 0.81 | 0.93 | 0.96 | 0.87 | 0.88 | 0.25 |
| TOP2B_PPP2R2B | 0.54 | 0.80 | 0.51 | 0.53 | 0.79 | 0.66 | 0.71 | 0.52 | 0.65 | 0.63 | 0.85 | 0.81 | 0.93 | 0.96 | 0.87 | 0.88 | 0.25 |
| TPK1_FAM129A | 0.54 | 0.80 | 0.51 | 0.53 | 0.79 | 0.66 | 0.71 | 0.52 | 0.65 | 0.63 | 0.85 | 0.81 | 0.93 | 0.96 | 0.87 | 0.88 | 0.25 |
| VASH1_PARP3 | 0.54 | 0.80 | 0.51 | 0.53 | 0.79 | 0.66 | 0.71 | 0.52 | 0.65 | 0.63 | 0.85 | 0.81 | 0.93 | 0.96 | 0.87 | 0.88 | 0.25 |
| VPREB3_ADRB2 | 0.54 | 0.80 | 0.51 | 0.53 | 0.79 | 0.66 | 0.71 | 0.52 | 0.65 | 0.63 | 0.85 | 0.81 | 0.93 | 0.96 | 0.87 | 0.88 | 0.25 |
| VPREB3_GFI1 | 0.54 | 0.80 | 0.51 | 0.53 | 0.79 | 0.66 | 0.71 | 0.52 | 0.65 | 0.63 | 0.85 | 0.81 | 0.93 | 0.96 | 0.87 | 0.88 | 0.25 |
| VPREB3_OASL | 0.54 | 0.80 | 0.51 | 0.53 | 0.79 | 0.66 | 0.71 | 0.52 | 0.65 | 0.63 | 0.85 | 0.81 | 0.93 | 0.96 | 0.87 | 0.88 | 0.25 |
| XPC_OASL | 0.54 | 0.80 | 0.51 | 0.53 | 0.79 | 0.66 | 0.71 | 0.52 | 0.65 | 0.63 | 0.85 | 0.81 | 0.93 | 0.96 | 0.87 | 0.88 | 0.25 |
| ZW10_PPP2R2B | 0.54 | 0.80 | 0.51 | 0.53 | 0.79 | 0.66 | 0.71 | 0.52 | 0.65 | 0.63 | 0.85 | 0.81 | 0.93 | 0.96 | 0.87 | 0.88 | 0.25 |
| ZW10_TAP1 | 0.54 | 0.80 | 0.51 | 0.53 | 0.79 | 0.66 | 0.71 | 0.52 | 0.65 | 0.63 | 0.85 | 0.81 | 0.93 | 0.96 | 0.87 | 0.88 | 0.25 |
| BACH2_FDFT1 | 0.61 | 0.63 | 0.91 | 0.68 | 0.83 | 0.63 | 0.69 | 0.64 | 0.59 | 0.69 | 0.86 | 0.93 | 0.91 | 1.00 | 0.90 | 0.92 | 0.23 |
| BACH2_GFI1 | 0.61 | 0.63 | 0.91 | 0.68 | 0.83 | 0.63 | 0.69 | 0.64 | 0.59 | 0.69 | 0.86 | 0.93 | 0.91 | 1.00 | 0.90 | 0.92 | 0.23 |
| BACH2_IFI16 | 0.61 | 0.63 | 0.91 | 0.68 | 0.83 | 0.63 | 0.69 | 0.64 | 0.59 | 0.69 | 0.86 | 0.93 | 0.91 | 1.00 | 0.90 | 0.92 | 0.23 |
| BACH2_SYNE2 | 0.61 | 0.63 | 0.91 | 0.68 | 0.83 | 0.63 | 0.69 | 0.64 | 0.59 | 0.69 | 0.86 | 0.93 | 0.91 | 1.00 | 0.90 | 0.92 | 0.23 |
| BACH2_TPST2 | 0.61 | 0.63 | 0.91 | 0.68 | 0.83 | 0.63 | 0.69 | 0.64 | 0.59 | 0.69 | 0.86 | 0.93 | 0.91 | 1.00 | 0.90 | 0.92 | 0.23 |
| CAMK1D_CD300A | 0.61 | 0.63 | 0.91 | 0.68 | 0.83 | 0.63 | 0.69 | 0.64 | 0.59 | 0.69 | 0.86 | 0.93 | 0.91 | 1.00 | 0.90 | 0.92 | 0.23 |
| CAMK1D_CST7 | 0.61 | 0.63 | 0.91 | 0.68 | 0.83 | 0.63 | 0.69 | 0.64 | 0.59 | 0.69 | 0.86 | 0.93 | 0.91 | 1.00 | 0.90 | 0.92 | 0.23 |
| CAMK1D_CYB561 | 0.61 | 0.63 | 0.91 | 0.68 | 0.83 | 0.63 | 0.69 | 0.64 | 0.59 | 0.69 | 0.86 | 0.93 | 0.91 | 1.00 | 0.90 | 0.92 | 0.23 |
| CAMK1D_GALNT10 | 0.61 | 0.63 | 0.91 | 0.68 | 0.83 | 0.63 | 0.69 | 0.64 | 0.59 | 0.69 | 0.86 | 0.93 | 0.91 | 1.00 | 0.90 | 0.92 | 0.23 |
| CAMK1D_TPST2 | 0.61 | 0.63 | 0.91 | 0.68 | 0.83 | 0.63 | 0.69 | 0.64 | 0.59 | 0.69 | 0.86 | 0.93 | 0.91 | 1.00 | 0.90 | 0.92 | 0.23 |
| CD37_OASL | 0.61 | 0.63 | 0.91 | 0.68 | 0.83 | 0.63 | 0.69 | 0.64 | 0.59 | 0.69 | 0.86 | 0.93 | 0.91 | 1.00 | 0.90 | 0.92 | 0.23 |
| CD79B_CCL5 | 0.61 | 0.63 | 0.91 | 0.68 | 0.83 | 0.63 | 0.69 | 0.64 | 0.59 | 0.69 | 0.86 | 0.93 | 0.91 | 1.00 | 0.90 | 0.92 | 0.23 |
| CD79B_SLAMF7 | 0.61 | 0.63 | 0.91 | 0.68 | 0.83 | 0.63 | 0.69 | 0.64 | 0.59 | 0.69 | 0.86 | 0.93 | 0.91 | 1.00 | 0.90 | 0.92 | 0.23 |
| CYLD_OASL | 0.61 | 0.63 | 0.91 | 0.68 | 0.83 | 0.63 | 0.69 | 0.64 | 0.59 | 0.69 | 0.86 | 0.93 | 0.91 | 1.00 | 0.90 | 0.92 | 0.23 |
| DHRS3_GFI1 | 0.61 | 0.63 | 0.91 | 0.68 | 0.83 | 0.63 | 0.69 | 0.64 | 0.59 | 0.69 | 0.86 | 0.93 | 0.91 | 1.00 | 0.90 | 0.92 | 0.23 |
| DHRS3_TPST2 | 0.61 | 0.63 | 0.91 | 0.68 | 0.83 | 0.63 | 0.69 | 0.64 | 0.59 | 0.69 | 0.86 | 0.93 | 0.91 | 1.00 | 0.90 | 0.92 | 0.23 |
| DPEP2_UBR2 | 0.61 | 0.63 | 0.91 | 0.68 | 0.83 | 0.63 | 0.69 | 0.64 | 0.59 | 0.69 | 0.86 | 0.93 | 0.91 | 1.00 | 0.90 | 0.92 | 0.23 |
| EEF1G_GALNT10 | 0.61 | 0.63 | 0.91 | 0.68 | 0.83 | 0.63 | 0.69 | 0.64 | 0.59 | 0.69 | 0.86 | 0.93 | 0.91 | 1.00 | 0.90 | 0.92 | 0.23 |
| EPHX2_BTG3 | 0.61 | 0.63 | 0.91 | 0.68 | 0.83 | 0.63 | 0.69 | 0.64 | 0.59 | 0.69 | 0.86 | 0.93 | 0.91 | 1.00 | 0.90 | 0.92 | 0.23 |
| EPHX2_CYB561 | 0.61 | 0.63 | 0.91 | 0.68 | 0.83 | 0.63 | 0.69 | 0.64 | 0.59 | 0.69 | 0.86 | 0.93 | 0.91 | 1.00 | 0.90 | 0.92 | 0.23 |
| EPHX2_EIF2AK2 | 0.61 | 0.63 | 0.91 | 0.68 | 0.83 | 0.63 | 0.69 | 0.64 | 0.59 | 0.69 | 0.86 | 0.93 | 0.91 | 1.00 | 0.90 | 0.92 | 0.23 |
| EPHX2_GFI1 | 0.61 | 0.63 | 0.91 | 0.68 | 0.83 | 0.63 | 0.69 | 0.64 | 0.59 | 0.69 | 0.86 | 0.93 | 0.91 | 1.00 | 0.90 | 0.92 | 0.23 |
| ETS1_TGFBR3 | 0.61 | 0.63 | 0.91 | 0.68 | 0.83 | 0.63 | 0.69 | 0.64 | 0.59 | 0.69 | 0.86 | 0.93 | 0.91 | 1.00 | 0.90 | 0.92 | 0.23 |
| FLNB_CST7 | 0.61 | 0.63 | 0.91 | 0.68 | 0.83 | 0.63 | 0.69 | 0.64 | 0.59 | 0.69 | 0.86 | 0.93 | 0.91 | 1.00 | 0.90 | 0.92 | 0.23 |
| FLNB_EHD1 | 0.61 | 0.63 | 0.91 | 0.68 | 0.83 | 0.63 | 0.69 | 0.64 | 0.59 | 0.69 | 0.86 | 0.93 | 0.91 | 1.00 | 0.90 | 0.92 | 0.23 |
| FLNB_GDPD5 | 0.61 | 0.63 | 0.91 | 0.68 | 0.83 | 0.63 | 0.69 | 0.64 | 0.59 | 0.69 | 0.86 | 0.93 | 0.91 | 1.00 | 0.90 | 0.92 | 0.23 |
| FLNB_GPR56 | 0.61 | 0.63 | 0.91 | 0.68 | 0.83 | 0.63 | 0.69 | 0.64 | 0.59 | 0.69 | 0.86 | 0.93 | 0.91 | 1.00 | 0.90 | 0.92 | 0.23 |
| FLNB_NKG7 | 0.61 | 0.63 | 0.91 | 0.68 | 0.83 | 0.63 | 0.69 | 0.64 | 0.59 | 0.69 | 0.86 | 0.93 | 0.91 | 1.00 | 0.90 | 0.92 | 0.23 |
| FLNB_SLAMF7 | 0.61 | 0.63 | 0.91 | 0.68 | 0.83 | 0.63 | 0.69 | 0.64 | 0.59 | 0.69 | 0.86 | 0.93 | 0.91 | 1.00 | 0.90 | 0.92 | 0.23 |
| GNG7_COL17A1 | 0.61 | 0.63 | 0.91 | 0.68 | 0.83 | 0.63 | 0.69 | 0.64 | 0.59 | 0.69 | 0.86 | 0.93 | 0.91 | 1.00 | 0.90 | 0.92 | 0.23 |
| GNG7_CST7 | 0.61 | 0.63 | 0.91 | 0.68 | 0.83 | 0.63 | 0.69 | 0.64 | 0.59 | 0.69 | 0.86 | 0.93 | 0.91 | 1.00 | 0.90 | 0.92 | 0.23 |
| GNG7_EIF2AK2 | 0.61 | 0.63 | 0.91 | 0.68 | 0.83 | 0.63 | 0.69 | 0.64 | 0.59 | 0.69 | 0.86 | 0.93 | 0.91 | 1.00 | 0.90 | 0.92 | 0.23 |
| GNG7_HERC5 | 0.61 | 0.63 | 0.91 | 0.68 | 0.83 | 0.63 | 0.69 | 0.64 | 0.59 | 0.69 | 0.86 | 0.93 | 0.91 | 1.00 | 0.90 | 0.92 | 0.23 |
| GNG7_KIF13B | 0.61 | 0.63 | 0.91 | 0.68 | 0.83 | 0.63 | 0.69 | 0.64 | 0.59 | 0.69 | 0.86 | 0.93 | 0.91 | 1.00 | 0.90 | 0.92 | 0.23 |
| GNG7_TMUB2 | 0.61 | 0.63 | 0.91 | 0.68 | 0.83 | 0.63 | 0.69 | 0.64 | 0.59 | 0.69 | 0.86 | 0.93 | 0.91 | 1.00 | 0.90 | 0.92 | 0.23 |
| GNG7_TPST2 | 0.61 | 0.63 | 0.91 | 0.68 | 0.83 | 0.63 | 0.69 | 0.64 | 0.59 | 0.69 | 0.86 | 0.93 | 0.91 | 1.00 | 0.90 | 0.92 | 0.23 |
| LAMA5_GFI1 | 0.61 | 0.63 | 0.91 | 0.68 | 0.83 | 0.63 | 0.69 | 0.64 | 0.59 | 0.69 | 0.86 | 0.93 | 0.91 | 1.00 | 0.90 | 0.92 | 0.23 |
| LDLRAP1_GFI1 | 0.61 | 0.63 | 0.91 | 0.68 | 0.83 | 0.63 | 0.69 | 0.64 | 0.59 | 0.69 | 0.86 | 0.93 | 0.91 | 1.00 | 0.90 | 0.92 | 0.23 |
| LSM7_PPP2R2B | 0.61 | 0.63 | 0.91 | 0.68 | 0.83 | 0.63 | 0.69 | 0.64 | 0.59 | 0.69 | 0.86 | 0.93 | 0.91 | 1.00 | 0.90 | 0.92 | 0.23 |
| MRPS18B_OASL | 0.61 | 0.63 | 0.91 | 0.68 | 0.83 | 0.63 | 0.69 | 0.64 | 0.59 | 0.69 | 0.86 | 0.93 | 0.91 | 1.00 | 0.90 | 0.92 | 0.23 |
| MZF1_PPP2R2B | 0.61 | 0.63 | 0.91 | 0.68 | 0.83 | 0.63 | 0.69 | 0.64 | 0.59 | 0.69 | 0.86 | 0.93 | 0.91 | 1.00 | 0.90 | 0.92 | 0.23 |
| NACA_ADRB2 | 0.61 | 0.63 | 0.91 | 0.68 | 0.83 | 0.63 | 0.69 | 0.64 | 0.59 | 0.69 | 0.86 | 0.93 | 0.91 | 1.00 | 0.90 | 0.92 | 0.23 |
| NACA_OASL | 0.61 | 0.63 | 0.91 | 0.68 | 0.83 | 0.63 | 0.69 | 0.64 | 0.59 | 0.69 | 0.86 | 0.93 | 0.91 | 1.00 | 0.90 | 0.92 | 0.23 |
| NAP1L1_FAM129A | 0.61 | 0.63 | 0.91 | 0.68 | 0.83 | 0.63 | 0.69 | 0.64 | 0.59 | 0.69 | 0.86 | 0.93 | 0.91 | 1.00 | 0.90 | 0.92 | 0.23 |
| NGFRAP1_OASL | 0.61 | 0.63 | 0.91 | 0.68 | 0.83 | 0.63 | 0.69 | 0.64 | 0.59 | 0.69 | 0.86 | 0.93 | 0.91 | 1.00 | 0.90 | 0.92 | 0.23 |
| NOSIP_CHST12 | 0.61 | 0.63 | 0.91 | 0.68 | 0.83 | 0.63 | 0.69 | 0.64 | 0.59 | 0.69 | 0.86 | 0.93 | 0.91 | 1.00 | 0.90 | 0.92 | 0.23 |
| NOSIP_GDPD5 | 0.61 | 0.63 | 0.91 | 0.68 | 0.83 | 0.63 | 0.69 | 0.64 | 0.59 | 0.69 | 0.86 | 0.93 | 0.91 | 1.00 | 0.90 | 0.92 | 0.23 |
| NOSIP_TAP1 | 0.61 | 0.63 | 0.91 | 0.68 | 0.83 | 0.63 | 0.69 | 0.64 | 0.59 | 0.69 | 0.86 | 0.93 | 0.91 | 1.00 | 0.90 | 0.92 | 0.23 |
| PABPC4_CCL5 | 0.61 | 0.63 | 0.91 | 0.68 | 0.83 | 0.63 | 0.69 | 0.64 | 0.59 | 0.69 | 0.86 | 0.93 | 0.91 | 1.00 | 0.90 | 0.92 | 0.23 |
| PHB2_GFI1 | 0.61 | 0.63 | 0.91 | 0.68 | 0.83 | 0.63 | 0.69 | 0.64 | 0.59 | 0.69 | 0.86 | 0.93 | 0.91 | 1.00 | 0.90 | 0.92 | 0.23 |
| PTOV1_PRDM1 | 0.61 | 0.63 | 0.91 | 0.68 | 0.83 | 0.63 | 0.69 | 0.64 | 0.59 | 0.69 | 0.86 | 0.93 | 0.91 | 1.00 | 0.90 | 0.92 | 0.23 |
| RAB3GAP1_OASL | 0.61 | 0.63 | 0.91 | 0.68 | 0.83 | 0.63 | 0.69 | 0.64 | 0.59 | 0.69 | 0.86 | 0.93 | 0.91 | 1.00 | 0.90 | 0.92 | 0.23 |
| RALA_ADRB2 | 0.61 | 0.63 | 0.91 | 0.68 | 0.83 | 0.63 | 0.69 | 0.64 | 0.59 | 0.69 | 0.86 | 0.93 | 0.91 | 1.00 | 0.90 | 0.92 | 0.23 |
| RALA_OASL | 0.61 | 0.63 | 0.91 | 0.68 | 0.83 | 0.63 | 0.69 | 0.64 | 0.59 | 0.69 | 0.86 | 0.93 | 0.91 | 1.00 | 0.90 | 0.92 | 0.23 |
| RALA_PPP2R2B | 0.61 | 0.63 | 0.91 | 0.68 | 0.83 | 0.63 | 0.69 | 0.64 | 0.59 | 0.69 | 0.86 | 0.93 | 0.91 | 1.00 | 0.90 | 0.92 | 0.23 |
| RBM17_PPP2R2B | 0.61 | 0.63 | 0.91 | 0.68 | 0.83 | 0.63 | 0.69 | 0.64 | 0.59 | 0.69 | 0.86 | 0.93 | 0.91 | 1.00 | 0.90 | 0.92 | 0.23 |
| RBM4B_PPP2R2B | 0.61 | 0.63 | 0.91 | 0.68 | 0.83 | 0.63 | 0.69 | 0.64 | 0.59 | 0.69 | 0.86 | 0.93 | 0.91 | 1.00 | 0.90 | 0.92 | 0.23 |
| RPL22_RARRES3 | 0.61 | 0.63 | 0.91 | 0.68 | 0.83 | 0.63 | 0.69 | 0.64 | 0.59 | 0.69 | 0.86 | 0.93 | 0.91 | 1.00 | 0.90 | 0.92 | 0.23 |
| RPL22_TPST2 | 0.61 | 0.63 | 0.91 | 0.68 | 0.83 | 0.63 | 0.69 | 0.64 | 0.59 | 0.69 | 0.86 | 0.93 | 0.91 | 1.00 | 0.90 | 0.92 | 0.23 |
| RPL36_OASL | 0.61 | 0.63 | 0.91 | 0.68 | 0.83 | 0.63 | 0.69 | 0.64 | 0.59 | 0.69 | 0.86 | 0.93 | 0.91 | 1.00 | 0.90 | 0.92 | 0.23 |
| SATB1_OASL | 0.61 | 0.63 | 0.91 | 0.68 | 0.83 | 0.63 | 0.69 | 0.64 | 0.59 | 0.69 | 0.86 | 0.93 | 0.91 | 1.00 | 0.90 | 0.92 | 0.23 |
| SLC5A6_OASL | 0.61 | 0.63 | 0.91 | 0.68 | 0.83 | 0.63 | 0.69 | 0.64 | 0.59 | 0.69 | 0.86 | 0.93 | 0.91 | 1.00 | 0.90 | 0.92 | 0.23 |
| TCF4_OASL | 0.61 | 0.63 | 0.91 | 0.68 | 0.83 | 0.63 | 0.69 | 0.64 | 0.59 | 0.69 | 0.86 | 0.93 | 0.91 | 1.00 | 0.90 | 0.92 | 0.23 |
| TCL1A_CCL5 | 0.61 | 0.63 | 0.91 | 0.68 | 0.83 | 0.63 | 0.69 | 0.64 | 0.59 | 0.69 | 0.86 | 0.93 | 0.91 | 1.00 | 0.90 | 0.92 | 0.23 |
| TMC6_CCL5 | 0.61 | 0.63 | 0.91 | 0.68 | 0.83 | 0.63 | 0.69 | 0.64 | 0.59 | 0.69 | 0.86 | 0.93 | 0.91 | 1.00 | 0.90 | 0.92 | 0.23 |
| TMC6_NKG7 | 0.61 | 0.63 | 0.91 | 0.68 | 0.83 | 0.63 | 0.69 | 0.64 | 0.59 | 0.69 | 0.86 | 0.93 | 0.91 | 1.00 | 0.90 | 0.92 | 0.23 |
| TMC6_OASL | 0.61 | 0.63 | 0.91 | 0.68 | 0.83 | 0.63 | 0.69 | 0.64 | 0.59 | 0.69 | 0.86 | 0.93 | 0.91 | 1.00 | 0.90 | 0.92 | 0.23 |
| UBE2D2_OASL | 0.61 | 0.63 | 0.91 | 0.68 | 0.83 | 0.63 | 0.69 | 0.64 | 0.59 | 0.69 | 0.86 | 0.93 | 0.91 | 1.00 | 0.90 | 0.92 | 0.23 |
| UBE2D2_PPP2R2B | 0.61 | 0.63 | 0.91 | 0.68 | 0.83 | 0.63 | 0.69 | 0.64 | 0.59 | 0.69 | 0.86 | 0.93 | 0.91 | 1.00 | 0.90 | 0.92 | 0.23 |
| VASH1_CASZ1 | 0.61 | 0.63 | 0.91 | 0.68 | 0.83 | 0.63 | 0.69 | 0.64 | 0.59 | 0.69 | 0.86 | 0.93 | 0.91 | 1.00 | 0.90 | 0.92 | 0.23 |
| VASH1_PRDM1 | 0.61 | 0.63 | 0.91 | 0.68 | 0.83 | 0.63 | 0.69 | 0.64 | 0.59 | 0.69 | 0.86 | 0.93 | 0.91 | 1.00 | 0.90 | 0.92 | 0.23 |
| VPREB3_CST7 | 0.61 | 0.63 | 0.91 | 0.68 | 0.83 | 0.63 | 0.69 | 0.64 | 0.59 | 0.69 | 0.86 | 0.93 | 0.91 | 1.00 | 0.90 | 0.92 | 0.23 |
| AKAP11_OASL | 0.69 | 0.52 | 0.82 | 0.61 | 0.74 | 0.64 | 0.78 | 0.60 | 0.46 | 0.65 | 0.85 | 0.86 | 1.00 | 0.93 | 0.74 | 0.88 | 0.22 |
| ARHGEF18_OASL | 0.69 | 0.52 | 0.82 | 0.61 | 0.74 | 0.64 | 0.78 | 0.60 | 0.46 | 0.65 | 0.85 | 0.86 | 1.00 | 0.93 | 0.74 | 0.88 | 0.22 |
| BACH2_IFITM1 | 0.69 | 0.52 | 0.82 | 0.61 | 0.74 | 0.64 | 0.78 | 0.60 | 0.46 | 0.65 | 0.85 | 0.86 | 1.00 | 0.93 | 0.74 | 0.88 | 0.22 |
| BACH2_PPP2R2B | 0.69 | 0.52 | 0.82 | 0.61 | 0.74 | 0.64 | 0.78 | 0.60 | 0.46 | 0.65 | 0.85 | 0.86 | 1.00 | 0.93 | 0.74 | 0.88 | 0.22 |
| BACH2_TDRD7 | 0.69 | 0.52 | 0.82 | 0.61 | 0.74 | 0.64 | 0.78 | 0.60 | 0.46 | 0.65 | 0.85 | 0.86 | 1.00 | 0.93 | 0.74 | 0.88 | 0.22 |
| BNIP3_PPP2R2B | 0.69 | 0.52 | 0.82 | 0.61 | 0.74 | 0.64 | 0.78 | 0.60 | 0.46 | 0.65 | 0.85 | 0.86 | 1.00 | 0.93 | 0.74 | 0.88 | 0.22 |
| C6orf48_OASL | 0.69 | 0.52 | 0.82 | 0.61 | 0.74 | 0.64 | 0.78 | 0.60 | 0.46 | 0.65 | 0.85 | 0.86 | 1.00 | 0.93 | 0.74 | 0.88 | 0.22 |
| CAMK1D_ADCY7 | 0.69 | 0.52 | 0.82 | 0.61 | 0.74 | 0.64 | 0.78 | 0.60 | 0.46 | 0.65 | 0.85 | 0.86 | 1.00 | 0.93 | 0.74 | 0.88 | 0.22 |
| CD79A_CCL5 | 0.69 | 0.52 | 0.82 | 0.61 | 0.74 | 0.64 | 0.78 | 0.60 | 0.46 | 0.65 | 0.85 | 0.86 | 1.00 | 0.93 | 0.74 | 0.88 | 0.22 |
| COX4I1_OASL | 0.69 | 0.52 | 0.82 | 0.61 | 0.74 | 0.64 | 0.78 | 0.60 | 0.46 | 0.65 | 0.85 | 0.86 | 1.00 | 0.93 | 0.74 | 0.88 | 0.22 |
| DGKA_OASL | 0.69 | 0.52 | 0.82 | 0.61 | 0.74 | 0.64 | 0.78 | 0.60 | 0.46 | 0.65 | 0.85 | 0.86 | 1.00 | 0.93 | 0.74 | 0.88 | 0.22 |
| DHRS3_CCL5 | 0.69 | 0.52 | 0.82 | 0.61 | 0.74 | 0.64 | 0.78 | 0.60 | 0.46 | 0.65 | 0.85 | 0.86 | 1.00 | 0.93 | 0.74 | 0.88 | 0.22 |
| DHRS3_OASL | 0.69 | 0.52 | 0.82 | 0.61 | 0.74 | 0.64 | 0.78 | 0.60 | 0.46 | 0.65 | 0.85 | 0.86 | 1.00 | 0.93 | 0.74 | 0.88 | 0.22 |
| DPEP2_OASL | 0.69 | 0.52 | 0.82 | 0.61 | 0.74 | 0.64 | 0.78 | 0.60 | 0.46 | 0.65 | 0.85 | 0.86 | 1.00 | 0.93 | 0.74 | 0.88 | 0.22 |
| EEF1G_TPST2 | 0.69 | 0.52 | 0.82 | 0.61 | 0.74 | 0.64 | 0.78 | 0.60 | 0.46 | 0.65 | 0.85 | 0.86 | 1.00 | 0.93 | 0.74 | 0.88 | 0.22 |
| EIF4B_GFI1 | 0.69 | 0.52 | 0.82 | 0.61 | 0.74 | 0.64 | 0.78 | 0.60 | 0.46 | 0.65 | 0.85 | 0.86 | 1.00 | 0.93 | 0.74 | 0.88 | 0.22 |
| EPHX2_ADCY7 | 0.69 | 0.52 | 0.82 | 0.61 | 0.74 | 0.64 | 0.78 | 0.60 | 0.46 | 0.65 | 0.85 | 0.86 | 1.00 | 0.93 | 0.74 | 0.88 | 0.22 |
| EPHX2_ADRB2 | 0.69 | 0.52 | 0.82 | 0.61 | 0.74 | 0.64 | 0.78 | 0.60 | 0.46 | 0.65 | 0.85 | 0.86 | 1.00 | 0.93 | 0.74 | 0.88 | 0.22 |
| EPHX2_GZMA | 0.69 | 0.52 | 0.82 | 0.61 | 0.74 | 0.64 | 0.78 | 0.60 | 0.46 | 0.65 | 0.85 | 0.86 | 1.00 | 0.93 | 0.74 | 0.88 | 0.22 |
| EPHX2_TAP1 | 0.69 | 0.52 | 0.82 | 0.61 | 0.74 | 0.64 | 0.78 | 0.60 | 0.46 | 0.65 | 0.85 | 0.86 | 1.00 | 0.93 | 0.74 | 0.88 | 0.22 |
| EPHX2_TPST2 | 0.69 | 0.52 | 0.82 | 0.61 | 0.74 | 0.64 | 0.78 | 0.60 | 0.46 | 0.65 | 0.85 | 0.86 | 1.00 | 0.93 | 0.74 | 0.88 | 0.22 |
| ETS1_CCL5 | 0.69 | 0.52 | 0.82 | 0.61 | 0.74 | 0.64 | 0.78 | 0.60 | 0.46 | 0.65 | 0.85 | 0.86 | 1.00 | 0.93 | 0.74 | 0.88 | 0.22 |
| ETS1_CD8A | 0.69 | 0.52 | 0.82 | 0.61 | 0.74 | 0.64 | 0.78 | 0.60 | 0.46 | 0.65 | 0.85 | 0.86 | 1.00 | 0.93 | 0.74 | 0.88 | 0.22 |
| ETS1_PPP2R2B | 0.69 | 0.52 | 0.82 | 0.61 | 0.74 | 0.64 | 0.78 | 0.60 | 0.46 | 0.65 | 0.85 | 0.86 | 1.00 | 0.93 | 0.74 | 0.88 | 0.22 |
| FLNB_ADRB2 | 0.69 | 0.52 | 0.82 | 0.61 | 0.74 | 0.64 | 0.78 | 0.60 | 0.46 | 0.65 | 0.85 | 0.86 | 1.00 | 0.93 | 0.74 | 0.88 | 0.22 |
| FLNB_CASZ1 | 0.69 | 0.52 | 0.82 | 0.61 | 0.74 | 0.64 | 0.78 | 0.60 | 0.46 | 0.65 | 0.85 | 0.86 | 1.00 | 0.93 | 0.74 | 0.88 | 0.22 |
| FLNB_HERC5 | 0.69 | 0.52 | 0.82 | 0.61 | 0.74 | 0.64 | 0.78 | 0.60 | 0.46 | 0.65 | 0.85 | 0.86 | 1.00 | 0.93 | 0.74 | 0.88 | 0.22 |
| FLNB_PFKP | 0.69 | 0.52 | 0.82 | 0.61 | 0.74 | 0.64 | 0.78 | 0.60 | 0.46 | 0.65 | 0.85 | 0.86 | 1.00 | 0.93 | 0.74 | 0.88 | 0.22 |
| GNG7_ADRB2 | 0.69 | 0.52 | 0.82 | 0.61 | 0.74 | 0.64 | 0.78 | 0.60 | 0.46 | 0.65 | 0.85 | 0.86 | 1.00 | 0.93 | 0.74 | 0.88 | 0.22 |
| GNG7_CASZ1 | 0.69 | 0.52 | 0.82 | 0.61 | 0.74 | 0.64 | 0.78 | 0.60 | 0.46 | 0.65 | 0.85 | 0.86 | 1.00 | 0.93 | 0.74 | 0.88 | 0.22 |
| GNG7_CD300A | 0.69 | 0.52 | 0.82 | 0.61 | 0.74 | 0.64 | 0.78 | 0.60 | 0.46 | 0.65 | 0.85 | 0.86 | 1.00 | 0.93 | 0.74 | 0.88 | 0.22 |
| GNG7_FDFT1 | 0.69 | 0.52 | 0.82 | 0.61 | 0.74 | 0.64 | 0.78 | 0.60 | 0.46 | 0.65 | 0.85 | 0.86 | 1.00 | 0.93 | 0.74 | 0.88 | 0.22 |
| GNG7_GALNT10 | 0.69 | 0.52 | 0.82 | 0.61 | 0.74 | 0.64 | 0.78 | 0.60 | 0.46 | 0.65 | 0.85 | 0.86 | 1.00 | 0.93 | 0.74 | 0.88 | 0.22 |
| GNG7_IFITM1 | 0.69 | 0.52 | 0.82 | 0.61 | 0.74 | 0.64 | 0.78 | 0.60 | 0.46 | 0.65 | 0.85 | 0.86 | 1.00 | 0.93 | 0.74 | 0.88 | 0.22 |
| GNG7_NKG7 | 0.69 | 0.52 | 0.82 | 0.61 | 0.74 | 0.64 | 0.78 | 0.60 | 0.46 | 0.65 | 0.85 | 0.86 | 1.00 | 0.93 | 0.74 | 0.88 | 0.22 |
| GNG7_PARP3 | 0.69 | 0.52 | 0.82 | 0.61 | 0.74 | 0.64 | 0.78 | 0.60 | 0.46 | 0.65 | 0.85 | 0.86 | 1.00 | 0.93 | 0.74 | 0.88 | 0.22 |
| GNG7_PXN | 0.69 | 0.52 | 0.82 | 0.61 | 0.74 | 0.64 | 0.78 | 0.60 | 0.46 | 0.65 | 0.85 | 0.86 | 1.00 | 0.93 | 0.74 | 0.88 | 0.22 |
| GNG7_SLAMF7 | 0.69 | 0.52 | 0.82 | 0.61 | 0.74 | 0.64 | 0.78 | 0.60 | 0.46 | 0.65 | 0.85 | 0.86 | 1.00 | 0.93 | 0.74 | 0.88 | 0.22 |
| GNG7_SYT11 | 0.69 | 0.52 | 0.82 | 0.61 | 0.74 | 0.64 | 0.78 | 0.60 | 0.46 | 0.65 | 0.85 | 0.86 | 1.00 | 0.93 | 0.74 | 0.88 | 0.22 |
| GNG7_UBE2L6 | 0.69 | 0.52 | 0.82 | 0.61 | 0.74 | 0.64 | 0.78 | 0.60 | 0.46 | 0.65 | 0.85 | 0.86 | 1.00 | 0.93 | 0.74 | 0.88 | 0.22 |
| HIC2_CASZ1 | 0.69 | 0.52 | 0.82 | 0.61 | 0.74 | 0.64 | 0.78 | 0.60 | 0.46 | 0.65 | 0.85 | 0.86 | 1.00 | 0.93 | 0.74 | 0.88 | 0.22 |
| HSD17B8_CD8A | 0.69 | 0.52 | 0.82 | 0.61 | 0.74 | 0.64 | 0.78 | 0.60 | 0.46 | 0.65 | 0.85 | 0.86 | 1.00 | 0.93 | 0.74 | 0.88 | 0.22 |
| HSD17B8_GFI1 | 0.69 | 0.52 | 0.82 | 0.61 | 0.74 | 0.64 | 0.78 | 0.60 | 0.46 | 0.65 | 0.85 | 0.86 | 1.00 | 0.93 | 0.74 | 0.88 | 0.22 |
| ITM2C_ZBP1 | 0.69 | 0.52 | 0.82 | 0.61 | 0.74 | 0.64 | 0.78 | 0.60 | 0.46 | 0.65 | 0.85 | 0.86 | 1.00 | 0.93 | 0.74 | 0.88 | 0.22 |
| LAMA5_PPP2R2B | 0.69 | 0.52 | 0.82 | 0.61 | 0.74 | 0.64 | 0.78 | 0.60 | 0.46 | 0.65 | 0.85 | 0.86 | 1.00 | 0.93 | 0.74 | 0.88 | 0.22 |
| LBH_PPP2R2B | 0.69 | 0.52 | 0.82 | 0.61 | 0.74 | 0.64 | 0.78 | 0.60 | 0.46 | 0.65 | 0.85 | 0.86 | 1.00 | 0.93 | 0.74 | 0.88 | 0.22 |
| LEF1_GDPD5 | 0.69 | 0.52 | 0.82 | 0.61 | 0.74 | 0.64 | 0.78 | 0.60 | 0.46 | 0.65 | 0.85 | 0.86 | 1.00 | 0.93 | 0.74 | 0.88 | 0.22 |
| LEF1_TGFBR3 | 0.69 | 0.52 | 0.82 | 0.61 | 0.74 | 0.64 | 0.78 | 0.60 | 0.46 | 0.65 | 0.85 | 0.86 | 1.00 | 0.93 | 0.74 | 0.88 | 0.22 |
| MAL_OASL | 0.69 | 0.52 | 0.82 | 0.61 | 0.74 | 0.64 | 0.78 | 0.60 | 0.46 | 0.65 | 0.85 | 0.86 | 1.00 | 0.93 | 0.74 | 0.88 | 0.22 |
| MAL_PPP2R2B | 0.69 | 0.52 | 0.82 | 0.61 | 0.74 | 0.64 | 0.78 | 0.60 | 0.46 | 0.65 | 0.85 | 0.86 | 1.00 | 0.93 | 0.74 | 0.88 | 0.22 |
| NAALADL1_RARRES3 | 0.69 | 0.52 | 0.82 | 0.61 | 0.74 | 0.64 | 0.78 | 0.60 | 0.46 | 0.65 | 0.85 | 0.86 | 1.00 | 0.93 | 0.74 | 0.88 | 0.22 |
| NACA_PPP2R2B | 0.69 | 0.52 | 0.82 | 0.61 | 0.74 | 0.64 | 0.78 | 0.60 | 0.46 | 0.65 | 0.85 | 0.86 | 1.00 | 0.93 | 0.74 | 0.88 | 0.22 |
| NACA_RABGAP1L | 0.69 | 0.52 | 0.82 | 0.61 | 0.74 | 0.64 | 0.78 | 0.60 | 0.46 | 0.65 | 0.85 | 0.86 | 1.00 | 0.93 | 0.74 | 0.88 | 0.22 |
| NAP1L1_PRDM1 | 0.69 | 0.52 | 0.82 | 0.61 | 0.74 | 0.64 | 0.78 | 0.60 | 0.46 | 0.65 | 0.85 | 0.86 | 1.00 | 0.93 | 0.74 | 0.88 | 0.22 |
| NGFRAP1_FAM129A | 0.69 | 0.52 | 0.82 | 0.61 | 0.74 | 0.64 | 0.78 | 0.60 | 0.46 | 0.65 | 0.85 | 0.86 | 1.00 | 0.93 | 0.74 | 0.88 | 0.22 |
| RPL10A_CD8A | 0.69 | 0.52 | 0.82 | 0.61 | 0.74 | 0.64 | 0.78 | 0.60 | 0.46 | 0.65 | 0.85 | 0.86 | 1.00 | 0.93 | 0.74 | 0.88 | 0.22 |
| RPL22_CST7 | 0.69 | 0.52 | 0.82 | 0.61 | 0.74 | 0.64 | 0.78 | 0.60 | 0.46 | 0.65 | 0.85 | 0.86 | 1.00 | 0.93 | 0.74 | 0.88 | 0.22 |
| RPL22_FAM129A | 0.69 | 0.52 | 0.82 | 0.61 | 0.74 | 0.64 | 0.78 | 0.60 | 0.46 | 0.65 | 0.85 | 0.86 | 1.00 | 0.93 | 0.74 | 0.88 | 0.22 |
| RPL22_OASL | 0.69 | 0.52 | 0.82 | 0.61 | 0.74 | 0.64 | 0.78 | 0.60 | 0.46 | 0.65 | 0.85 | 0.86 | 1.00 | 0.93 | 0.74 | 0.88 | 0.22 |
| RPL22_TAP1 | 0.69 | 0.52 | 0.82 | 0.61 | 0.74 | 0.64 | 0.78 | 0.60 | 0.46 | 0.65 | 0.85 | 0.86 | 1.00 | 0.93 | 0.74 | 0.88 | 0.22 |
| RPL36_PPP2R2B | 0.69 | 0.52 | 0.82 | 0.61 | 0.74 | 0.64 | 0.78 | 0.60 | 0.46 | 0.65 | 0.85 | 0.86 | 1.00 | 0.93 | 0.74 | 0.88 | 0.22 |
| RPL36_RARRES3 | 0.69 | 0.52 | 0.82 | 0.61 | 0.74 | 0.64 | 0.78 | 0.60 | 0.46 | 0.65 | 0.85 | 0.86 | 1.00 | 0.93 | 0.74 | 0.88 | 0.22 |
| RPS5_PPP2R2B | 0.69 | 0.52 | 0.82 | 0.61 | 0.74 | 0.64 | 0.78 | 0.60 | 0.46 | 0.65 | 0.85 | 0.86 | 1.00 | 0.93 | 0.74 | 0.88 | 0.22 |
| TBC1D4_OASL | 0.69 | 0.52 | 0.82 | 0.61 | 0.74 | 0.64 | 0.78 | 0.60 | 0.46 | 0.65 | 0.85 | 0.86 | 1.00 | 0.93 | 0.74 | 0.88 | 0.22 |
| TCL1A_PPP2R2B | 0.69 | 0.52 | 0.82 | 0.61 | 0.74 | 0.64 | 0.78 | 0.60 | 0.46 | 0.65 | 0.85 | 0.86 | 1.00 | 0.93 | 0.74 | 0.88 | 0.22 |
| TCL1A_ZBP1 | 0.69 | 0.52 | 0.82 | 0.61 | 0.74 | 0.64 | 0.78 | 0.60 | 0.46 | 0.65 | 0.85 | 0.86 | 1.00 | 0.93 | 0.74 | 0.88 | 0.22 |
| TOP2B_GFI1 | 0.69 | 0.52 | 0.82 | 0.61 | 0.74 | 0.64 | 0.78 | 0.60 | 0.46 | 0.65 | 0.85 | 0.86 | 1.00 | 0.93 | 0.74 | 0.88 | 0.22 |
| VASH1_ARSB | 0.69 | 0.52 | 0.82 | 0.61 | 0.74 | 0.64 | 0.78 | 0.60 | 0.46 | 0.65 | 0.85 | 0.86 | 1.00 | 0.93 | 0.74 | 0.88 | 0.22 |
| VASH1_CST7 | 0.69 | 0.52 | 0.82 | 0.61 | 0.74 | 0.64 | 0.78 | 0.60 | 0.46 | 0.65 | 0.85 | 0.86 | 1.00 | 0.93 | 0.74 | 0.88 | 0.22 |
| VASH1_OASL | 0.69 | 0.52 | 0.82 | 0.61 | 0.74 | 0.64 | 0.78 | 0.60 | 0.46 | 0.65 | 0.85 | 0.86 | 1.00 | 0.93 | 0.74 | 0.88 | 0.22 |
| VPREB3_CD8A | 0.69 | 0.52 | 0.82 | 0.61 | 0.74 | 0.64 | 0.78 | 0.60 | 0.46 | 0.65 | 0.85 | 0.86 | 1.00 | 0.93 | 0.74 | 0.88 | 0.22 |
| VPREB3_RARRES3 | 0.69 | 0.52 | 0.82 | 0.61 | 0.74 | 0.64 | 0.78 | 0.60 | 0.46 | 0.65 | 0.85 | 0.86 | 1.00 | 0.93 | 0.74 | 0.88 | 0.22 |
| ALDOC_CCL5 | 0.53 | 0.85 | 0.61 | 0.53 | 0.80 | 0.83 | 0.71 | 0.60 | 0.50 | 0.66 | 0.84 | 0.82 | 0.94 | 1.00 | 0.69 | 0.86 | 0.19 |
| BACH2_ARNTL | 0.53 | 0.85 | 0.61 | 0.53 | 0.80 | 0.83 | 0.71 | 0.60 | 0.50 | 0.66 | 0.84 | 0.82 | 0.94 | 1.00 | 0.69 | 0.86 | 0.19 |
| BACH2_CD300A | 0.53 | 0.85 | 0.61 | 0.53 | 0.80 | 0.83 | 0.71 | 0.60 | 0.50 | 0.66 | 0.84 | 0.82 | 0.94 | 1.00 | 0.69 | 0.86 | 0.19 |
| BACH2_FAM129A | 0.53 | 0.85 | 0.61 | 0.53 | 0.80 | 0.83 | 0.71 | 0.60 | 0.50 | 0.66 | 0.84 | 0.82 | 0.94 | 1.00 | 0.69 | 0.86 | 0.19 |
| BACH_IFI44 | 0.53 | 0.85 | 0.61 | 0.53 | 0.80 | 0.83 | 0.71 | 0.60 | 0.50 | 0.66 | 0.84 | 0.82 | 0.94 | 1.00 | 0.69 | 0.86 | 0.19 |
| BCL11A_OASL | 0.53 | 0.85 | 0.61 | 0.53 | 0.80 | 0.83 | 0.71 | 0.60 | 0.50 | 0.66 | 0.84 | 0.82 | 0.94 | 1.00 | 0.69 | 0.86 | 0.19 |
| BCL11A_PPP2R2B | 0.53 | 0.85 | 0.61 | 0.53 | 0.80 | 0.83 | 0.71 | 0.60 | 0.50 | 0.66 | 0.84 | 0.82 | 0.94 | 1.00 | 0.69 | 0.86 | 0.19 |
| BTG1_OASL | 0.53 | 0.85 | 0.61 | 0.53 | 0.80 | 0.83 | 0.71 | 0.60 | 0.50 | 0.66 | 0.84 | 0.82 | 0.94 | 1.00 | 0.69 | 0.86 | 0.19 |
| CD79B_CD300A | 0.53 | 0.85 | 0.61 | 0.53 | 0.80 | 0.83 | 0.71 | 0.60 | 0.50 | 0.66 | 0.84 | 0.82 | 0.94 | 1.00 | 0.69 | 0.86 | 0.19 |
| CD79B_CD8A | 0.53 | 0.85 | 0.61 | 0.53 | 0.80 | 0.83 | 0.71 | 0.60 | 0.50 | 0.66 | 0.84 | 0.82 | 0.94 | 1.00 | 0.69 | 0.86 | 0.19 |
| CD79B_OASL | 0.53 | 0.85 | 0.61 | 0.53 | 0.80 | 0.83 | 0.71 | 0.60 | 0.50 | 0.66 | 0.84 | 0.82 | 0.94 | 1.00 | 0.69 | 0.86 | 0.19 |
| CD79B_ZBP1 | 0.53 | 0.85 | 0.61 | 0.53 | 0.80 | 0.83 | 0.71 | 0.60 | 0.50 | 0.66 | 0.84 | 0.82 | 0.94 | 1.00 | 0.69 | 0.86 | 0.19 |
| EEF1G_OASL | 0.53 | 0.85 | 0.61 | 0.53 | 0.80 | 0.83 | 0.71 | 0.60 | 0.50 | 0.66 | 0.84 | 0.82 | 0.94 | 1.00 | 0.69 | 0.86 | 0.19 |
| EPHX2_CD300A | 0.53 | 0.85 | 0.61 | 0.53 | 0.80 | 0.83 | 0.71 | 0.60 | 0.50 | 0.66 | 0.84 | 0.82 | 0.94 | 1.00 | 0.69 | 0.86 | 0.19 |
| EPHX2_IFI44 | 0.53 | 0.85 | 0.61 | 0.53 | 0.80 | 0.83 | 0.71 | 0.60 | 0.50 | 0.66 | 0.84 | 0.82 | 0.94 | 1.00 | 0.69 | 0.86 | 0.19 |
| EPHX2_IFITM1 | 0.53 | 0.85 | 0.61 | 0.53 | 0.80 | 0.83 | 0.71 | 0.60 | 0.50 | 0.66 | 0.84 | 0.82 | 0.94 | 1.00 | 0.69 | 0.86 | 0.19 |
| EPHX2_OASL | 0.53 | 0.85 | 0.61 | 0.53 | 0.80 | 0.83 | 0.71 | 0.60 | 0.50 | 0.66 | 0.84 | 0.82 | 0.94 | 1.00 | 0.69 | 0.86 | 0.19 |
| EPHX2_PPP2R2B | 0.53 | 0.85 | 0.61 | 0.53 | 0.80 | 0.83 | 0.71 | 0.60 | 0.50 | 0.66 | 0.84 | 0.82 | 0.94 | 1.00 | 0.69 | 0.86 | 0.19 |
| EPHX2_ZBP1 | 0.53 | 0.85 | 0.61 | 0.53 | 0.80 | 0.83 | 0.71 | 0.60 | 0.50 | 0.66 | 0.84 | 0.82 | 0.94 | 1.00 | 0.69 | 0.86 | 0.19 |
| FLNB_ATP2B4 | 0.53 | 0.85 | 0.61 | 0.53 | 0.80 | 0.83 | 0.71 | 0.60 | 0.50 | 0.66 | 0.84 | 0.82 | 0.94 | 1.00 | 0.69 | 0.86 | 0.19 |
| FLNB_CCL5 | 0.53 | 0.85 | 0.61 | 0.53 | 0.80 | 0.83 | 0.71 | 0.60 | 0.50 | 0.66 | 0.84 | 0.82 | 0.94 | 1.00 | 0.69 | 0.86 | 0.19 |
| FLNB_FAM129A | 0.53 | 0.85 | 0.61 | 0.53 | 0.80 | 0.83 | 0.71 | 0.60 | 0.50 | 0.66 | 0.84 | 0.82 | 0.94 | 1.00 | 0.69 | 0.86 | 0.19 |
| FLNB_GFI1 | 0.53 | 0.85 | 0.61 | 0.53 | 0.80 | 0.83 | 0.71 | 0.60 | 0.50 | 0.66 | 0.84 | 0.82 | 0.94 | 1.00 | 0.69 | 0.86 | 0.19 |
| FLNB_IKBKG | 0.53 | 0.85 | 0.61 | 0.53 | 0.80 | 0.83 | 0.71 | 0.60 | 0.50 | 0.66 | 0.84 | 0.82 | 0.94 | 1.00 | 0.69 | 0.86 | 0.19 |
| FLNB_KIF13B | 0.53 | 0.85 | 0.61 | 0.53 | 0.80 | 0.83 | 0.71 | 0.60 | 0.50 | 0.66 | 0.84 | 0.82 | 0.94 | 1.00 | 0.69 | 0.86 | 0.19 |
| FLNB_OASL | 0.53 | 0.85 | 0.61 | 0.53 | 0.80 | 0.83 | 0.71 | 0.60 | 0.50 | 0.66 | 0.84 | 0.82 | 0.94 | 1.00 | 0.69 | 0.86 | 0.19 |
| FLNB_RUNX3 | 0.53 | 0.85 | 0.61 | 0.53 | 0.80 | 0.83 | 0.71 | 0.60 | 0.50 | 0.66 | 0.84 | 0.82 | 0.94 | 1.00 | 0.69 | 0.86 | 0.19 |
| GNG7_DNPEP | 0.53 | 0.85 | 0.61 | 0.53 | 0.80 | 0.83 | 0.71 | 0.60 | 0.50 | 0.66 | 0.84 | 0.82 | 0.94 | 1.00 | 0.69 | 0.86 | 0.19 |
| GNG7_EHD1 | 0.53 | 0.85 | 0.61 | 0.53 | 0.80 | 0.83 | 0.71 | 0.60 | 0.50 | 0.66 | 0.84 | 0.82 | 0.94 | 1.00 | 0.69 | 0.86 | 0.19 |
| GNG7_PPP2R2B | 0.53 | 0.85 | 0.61 | 0.53 | 0.80 | 0.83 | 0.71 | 0.60 | 0.50 | 0.66 | 0.84 | 0.82 | 0.94 | 1.00 | 0.69 | 0.86 | 0.19 |
| GNG7_TDRD7 | 0.53 | 0.85 | 0.61 | 0.53 | 0.80 | 0.83 | 0.71 | 0.60 | 0.50 | 0.66 | 0.84 | 0.82 | 0.94 | 1.00 | 0.69 | 0.86 | 0.19 |
| GNG7_ZBP1 | 0.53 | 0.85 | 0.61 | 0.53 | 0.80 | 0.83 | 0.71 | 0.60 | 0.50 | 0.66 | 0.84 | 0.82 | 0.94 | 1.00 | 0.69 | 0.86 | 0.19 |
| GPR162_OASL | 0.53 | 0.85 | 0.61 | 0.53 | 0.80 | 0.83 | 0.71 | 0.60 | 0.50 | 0.66 | 0.84 | 0.82 | 0.94 | 1.00 | 0.69 | 0.86 | 0.19 |
| GRWD1_OASL | 0.53 | 0.85 | 0.61 | 0.53 | 0.80 | 0.83 | 0.71 | 0.60 | 0.50 | 0.66 | 0.84 | 0.82 | 0.94 | 1.00 | 0.69 | 0.86 | 0.19 |
| HSD17B8_OASL | 0.53 | 0.85 | 0.61 | 0.53 | 0.80 | 0.83 | 0.71 | 0.60 | 0.50 | 0.66 | 0.84 | 0.82 | 0.94 | 1.00 | 0.69 | 0.86 | 0.19 |
| LDLRAP1_CCL5 | 0.53 | 0.85 | 0.61 | 0.53 | 0.80 | 0.83 | 0.71 | 0.60 | 0.50 | 0.66 | 0.84 | 0.82 | 0.94 | 1.00 | 0.69 | 0.86 | 0.19 |
| LDLRAP1_PPP2R2B | 0.53 | 0.85 | 0.61 | 0.53 | 0.80 | 0.83 | 0.71 | 0.60 | 0.50 | 0.66 | 0.84 | 0.82 | 0.94 | 1.00 | 0.69 | 0.86 | 0.19 |
| LTBP3_OASL | 0.53 | 0.85 | 0.61 | 0.53 | 0.80 | 0.83 | 0.71 | 0.60 | 0.50 | 0.66 | 0.84 | 0.82 | 0.94 | 1.00 | 0.69 | 0.86 | 0.19 |
| MAL_CCL5 | 0.53 | 0.85 | 0.61 | 0.53 | 0.80 | 0.83 | 0.71 | 0.60 | 0.50 | 0.66 | 0.84 | 0.82 | 0.94 | 1.00 | 0.69 | 0.86 | 0.19 |
| MAL_TGFBR3 | 0.53 | 0.85 | 0.61 | 0.53 | 0.80 | 0.83 | 0.71 | 0.60 | 0.50 | 0.66 | 0.84 | 0.82 | 0.94 | 1.00 | 0.69 | 0.86 | 0.19 |
| NAALADL1_OASL | 0.53 | 0.85 | 0.61 | 0.53 | 0.80 | 0.83 | 0.71 | 0.60 | 0.50 | 0.66 | 0.84 | 0.82 | 0.94 | 1.00 | 0.69 | 0.86 | 0.19 |
| NACA_BTG3 | 0.53 | 0.85 | 0.61 | 0.53 | 0.80 | 0.83 | 0.71 | 0.60 | 0.50 | 0.66 | 0.84 | 0.82 | 0.94 | 1.00 | 0.69 | 0.86 | 0.19 |
| NACA_FAM129A | 0.53 | 0.85 | 0.61 | 0.53 | 0.80 | 0.83 | 0.71 | 0.60 | 0.50 | 0.66 | 0.84 | 0.82 | 0.94 | 1.00 | 0.69 | 0.86 | 0.19 |
| NACA_GALNT10 | 0.53 | 0.85 | 0.61 | 0.53 | 0.80 | 0.83 | 0.71 | 0.60 | 0.50 | 0.66 | 0.84 | 0.82 | 0.94 | 1.00 | 0.69 | 0.86 | 0.19 |
| NACA_GZMA | 0.53 | 0.85 | 0.61 | 0.53 | 0.80 | 0.83 | 0.71 | 0.60 | 0.50 | 0.66 | 0.84 | 0.82 | 0.94 | 1.00 | 0.69 | 0.86 | 0.19 |
| NACA_SYT11 | 0.53 | 0.85 | 0.61 | 0.53 | 0.80 | 0.83 | 0.71 | 0.60 | 0.50 | 0.66 | 0.84 | 0.82 | 0.94 | 1.00 | 0.69 | 0.86 | 0.19 |
| NAP1L1_PPP2R2B | 0.53 | 0.85 | 0.61 | 0.53 | 0.80 | 0.83 | 0.71 | 0.60 | 0.50 | 0.66 | 0.84 | 0.82 | 0.94 | 1.00 | 0.69 | 0.86 | 0.19 |
| NOSIP_OASL | 0.53 | 0.85 | 0.61 | 0.53 | 0.80 | 0.83 | 0.71 | 0.60 | 0.50 | 0.66 | 0.84 | 0.82 | 0.94 | 1.00 | 0.69 | 0.86 | 0.19 |
| NOSIP_PRKD2 | 0.53 | 0.85 | 0.61 | 0.53 | 0.80 | 0.83 | 0.71 | 0.60 | 0.50 | 0.66 | 0.84 | 0.82 | 0.94 | 1.00 | 0.69 | 0.86 | 0.19 |
| PIK3IP1_OASL | 0.53 | 0.85 | 0.61 | 0.53 | 0.80 | 0.83 | 0.71 | 0.60 | 0.50 | 0.66 | 0.84 | 0.82 | 0.94 | 1.00 | 0.69 | 0.86 | 0.19 |
| POP5_TPST2 | 0.53 | 0.85 | 0.61 | 0.53 | 0.80 | 0.83 | 0.71 | 0.60 | 0.50 | 0.66 | 0.84 | 0.82 | 0.94 | 1.00 | 0.69 | 0.86 | 0.19 |
| PTOV1_OASL | 0.53 | 0.85 | 0.61 | 0.53 | 0.80 | 0.83 | 0.71 | 0.60 | 0.50 | 0.66 | 0.84 | 0.82 | 0.94 | 1.00 | 0.69 | 0.86 | 0.19 |
| RPL10A_CST7 | 0.53 | 0.85 | 0.61 | 0.53 | 0.80 | 0.83 | 0.71 | 0.60 | 0.50 | 0.66 | 0.84 | 0.82 | 0.94 | 1.00 | 0.69 | 0.86 | 0.19 |
| RPL10A_PPP2R2B | 0.53 | 0.85 | 0.61 | 0.53 | 0.80 | 0.83 | 0.71 | 0.60 | 0.50 | 0.66 | 0.84 | 0.82 | 0.94 | 1.00 | 0.69 | 0.86 | 0.19 |
| RPL22_CD8A | 0.53 | 0.85 | 0.61 | 0.53 | 0.80 | 0.83 | 0.71 | 0.60 | 0.50 | 0.66 | 0.84 | 0.82 | 0.94 | 1.00 | 0.69 | 0.86 | 0.19 |
| RPL22_GZMA | 0.53 | 0.85 | 0.61 | 0.53 | 0.80 | 0.83 | 0.71 | 0.60 | 0.50 | 0.66 | 0.84 | 0.82 | 0.94 | 1.00 | 0.69 | 0.86 | 0.19 |
| RPL22_KPNB1 | 0.53 | 0.85 | 0.61 | 0.53 | 0.80 | 0.83 | 0.71 | 0.60 | 0.50 | 0.66 | 0.84 | 0.82 | 0.94 | 1.00 | 0.69 | 0.86 | 0.19 |
| RPL22_TXN | 0.53 | 0.85 | 0.61 | 0.53 | 0.80 | 0.83 | 0.71 | 0.60 | 0.50 | 0.66 | 0.84 | 0.82 | 0.94 | 1.00 | 0.69 | 0.86 | 0.19 |
| RPL27_TPST2 | 0.53 | 0.85 | 0.61 | 0.53 | 0.80 | 0.83 | 0.71 | 0.60 | 0.50 | 0.66 | 0.84 | 0.82 | 0.94 | 1.00 | 0.69 | 0.86 | 0.19 |
| RPL30_PPP2R2B | 0.53 | 0.85 | 0.61 | 0.53 | 0.80 | 0.83 | 0.71 | 0.60 | 0.50 | 0.66 | 0.84 | 0.82 | 0.94 | 1.00 | 0.69 | 0.86 | 0.19 |
| RPL36_GFI1 | 0.53 | 0.85 | 0.61 | 0.53 | 0.80 | 0.83 | 0.71 | 0.60 | 0.50 | 0.66 | 0.84 | 0.82 | 0.94 | 1.00 | 0.69 | 0.86 | 0.19 |
| RPL8_GFI1 | 0.53 | 0.85 | 0.61 | 0.53 | 0.80 | 0.83 | 0.71 | 0.60 | 0.50 | 0.66 | 0.84 | 0.82 | 0.94 | 1.00 | 0.69 | 0.86 | 0.19 |
| SERBP1_PPP2R2B | 0.53 | 0.85 | 0.61 | 0.53 | 0.80 | 0.83 | 0.71 | 0.60 | 0.50 | 0.66 | 0.84 | 0.82 | 0.94 | 1.00 | 0.69 | 0.86 | 0.19 |
| SRM_OASL | 0.53 | 0.85 | 0.61 | 0.53 | 0.80 | 0.83 | 0.71 | 0.60 | 0.50 | 0.66 | 0.84 | 0.82 | 0.94 | 1.00 | 0.69 | 0.86 | 0.19 |
| TMC6_PPP2R2B | 0.53 | 0.85 | 0.61 | 0.53 | 0.80 | 0.83 | 0.71 | 0.60 | 0.50 | 0.66 | 0.84 | 0.82 | 0.94 | 1.00 | 0.69 | 0.86 | 0.19 |
| TMEM39B_FAM129A | 0.53 | 0.85 | 0.61 | 0.53 | 0.80 | 0.83 | 0.71 | 0.60 | 0.50 | 0.66 | 0.84 | 0.82 | 0.94 | 1.00 | 0.69 | 0.86 | 0.19 |
| TRAF3IP3_PPP2R2B | 0.53 | 0.85 | 0.61 | 0.53 | 0.80 | 0.83 | 0.71 | 0.60 | 0.50 | 0.66 | 0.84 | 0.82 | 0.94 | 1.00 | 0.69 | 0.86 | 0.19 |
| VASH1_CYB561 | 0.53 | 0.85 | 0.61 | 0.53 | 0.80 | 0.83 | 0.71 | 0.60 | 0.50 | 0.66 | 0.84 | 0.82 | 0.94 | 1.00 | 0.69 | 0.86 | 0.19 |
| VPREB3_PPP2R2B | 0.53 | 0.85 | 0.61 | 0.53 | 0.80 | 0.83 | 0.71 | 0.60 | 0.50 | 0.66 | 0.84 | 0.82 | 0.94 | 1.00 | 0.69 | 0.86 | 0.19 |
| VPREB3_TPST2 | 0.53 | 0.85 | 0.61 | 0.53 | 0.80 | 0.83 | 0.71 | 0.60 | 0.50 | 0.66 | 0.84 | 0.82 | 0.94 | 1.00 | 0.69 | 0.86 | 0.19 |
| VPS35_FAM129A | 0.53 | 0.85 | 0.61 | 0.53 | 0.80 | 0.83 | 0.71 | 0.60 | 0.50 | 0.66 | 0.84 | 0.82 | 0.94 | 1.00 | 0.69 | 0.86 | 0.19 |
| VPS35_IFI16 | 0.53 | 0.85 | 0.61 | 0.53 | 0.80 | 0.83 | 0.71 | 0.60 | 0.50 | 0.66 | 0.84 | 0.82 | 0.94 | 1.00 | 0.69 | 0.86 | 0.19 |
| BACH2_KPNB1 | 0.68 | 0.53 | 0.65 | 0.80 | 0.93 | 0.74 | 0.86 | 0.71 | 0.70 | 0.73 | 0.82 | 0.90 | 0.99 | 0.89 | 0.68 | 0.85 | 0.12 |
| EEF1G_CST7 | 0.68 | 0.53 | 0.65 | 0.80 | 0.93 | 0.74 | 0.86 | 0.71 | 0.70 | 0.73 | 0.82 | 0.90 | 0.99 | 0.89 | 0.68 | 0.85 | 0.12 |
| EPHX2_GDPD5 | 0.68 | 0.53 | 0.65 | 0.80 | 0.93 | 0.74 | 0.86 | 0.71 | 0.70 | 0.73 | 0.82 | 0.90 | 0.99 | 0.89 | 0.68 | 0.85 | 0.12 |
| GNG7_RARRES3 | 0.68 | 0.53 | 0.65 | 0.80 | 0.93 | 0.74 | 0.86 | 0.71 | 0.70 | 0.73 | 0.82 | 0.90 | 0.99 | 0.89 | 0.68 | 0.85 | 0.12 |
| HSD17B8_PPP2R2B | 0.68 | 0.53 | 0.65 | 0.80 | 0.93 | 0.74 | 0.86 | 0.71 | 0.70 | 0.73 | 0.82 | 0.90 | 0.99 | 0.89 | 0.68 | 0.85 | 0.12 |
| LEF1_FAM129A | 0.68 | 0.53 | 0.65 | 0.80 | 0.93 | 0.74 | 0.86 | 0.71 | 0.70 | 0.73 | 0.82 | 0.90 | 0.99 | 0.89 | 0.68 | 0.85 | 0.12 |
| LRMP_OASL | 0.68 | 0.53 | 0.65 | 0.80 | 0.93 | 0.74 | 0.86 | 0.71 | 0.70 | 0.73 | 0.82 | 0.90 | 0.99 | 0.89 | 0.68 | 0.85 | 0.12 |
| NACA_TBK1 | 0.68 | 0.53 | 0.65 | 0.80 | 0.93 | 0.74 | 0.86 | 0.71 | 0.70 | 0.73 | 0.82 | 0.90 | 0.99 | 0.89 | 0.68 | 0.85 | 0.12 |
| NAP1L1_GFI1 | 0.68 | 0.53 | 0.65 | 0.80 | 0.93 | 0.74 | 0.86 | 0.71 | 0.70 | 0.73 | 0.82 | 0.90 | 0.99 | 0.89 | 0.68 | 0.85 | 0.12 |
| NECAP2_OASL | 0.68 | 0.53 | 0.65 | 0.80 | 0.93 | 0.74 | 0.86 | 0.71 | 0.70 | 0.73 | 0.82 | 0.90 | 0.99 | 0.89 | 0.68 | 0.85 | 0.12 |
| RPL10A_GFI1 | 0.68 | 0.53 | 0.65 | 0.80 | 0.93 | 0.74 | 0.86 | 0.71 | 0.70 | 0.73 | 0.82 | 0.90 | 0.99 | 0.89 | 0.68 | 0.85 | 0.12 |
| RPL11_OASL | 0.68 | 0.53 | 0.65 | 0.80 | 0.93 | 0.74 | 0.86 | 0.71 | 0.70 | 0.73 | 0.82 | 0.90 | 0.99 | 0.89 | 0.68 | 0.85 | 0.12 |
| RPL15_GFI1 | 0.68 | 0.53 | 0.65 | 0.80 | 0.93 | 0.74 | 0.86 | 0.71 | 0.70 | 0.73 | 0.82 | 0.90 | 0.99 | 0.89 | 0.68 | 0.85 | 0.12 |
| RPL22_ADRB2 | 0.68 | 0.53 | 0.65 | 0.80 | 0.93 | 0.74 | 0.86 | 0.71 | 0.70 | 0.73 | 0.82 | 0.90 | 0.99 | 0.89 | 0.68 | 0.85 | 0.12 |
| RPS11_OASL | 0.68 | 0.53 | 0.65 | 0.80 | 0.93 | 0.74 | 0.86 | 0.71 | 0.70 | 0.73 | 0.82 | 0.90 | 0.99 | 0.89 | 0.68 | 0.85 | 0.12 |
| RPS9_OASL | 0.68 | 0.53 | 0.65 | 0.80 | 0.93 | 0.74 | 0.86 | 0.71 | 0.70 | 0.73 | 0.82 | 0.90 | 0.99 | 0.89 | 0.68 | 0.85 | 0.12 |
| SERPINE2_TPST2 | 0.68 | 0.53 | 0.65 | 0.80 | 0.93 | 0.74 | 0.86 | 0.71 | 0.70 | 0.73 | 0.82 | 0.90 | 0.99 | 0.89 | 0.68 | 0.85 | 0.12 |
| SPINT2_TAP1 | 0.68 | 0.53 | 0.65 | 0.80 | 0.93 | 0.74 | 0.86 | 0.71 | 0.70 | 0.73 | 0.82 | 0.90 | 0.99 | 0.89 | 0.68 | 0.85 | 0.12 |
| SYPL1_TPST2 | 0.68 | 0.53 | 0.65 | 0.80 | 0.93 | 0.74 | 0.86 | 0.71 | 0.70 | 0.73 | 0.82 | 0.90 | 0.99 | 0.89 | 0.68 | 0.85 | 0.12 |
| TBC1D4_GFI1 | 0.68 | 0.53 | 0.65 | 0.80 | 0.93 | 0.74 | 0.86 | 0.71 | 0.70 | 0.73 | 0.82 | 0.90 | 0.99 | 0.89 | 0.68 | 0.85 | 0.12 |
| ADSL_TPST2 | 0.49 | 0.82 | 0.98 | 0.59 | 0.96 | 0.70 | 0.79 | 0.79 | 0.66 | 0.75 | 0.84 | 0.88 | 1.00 | 0.70 | 0.81 | 0.85 | 0.09 |
| AKAP11_TDRD7 | 0.49 | 0.82 | 0.98 | 0.59 | 0.96 | 0.70 | 0.79 | 0.79 | 0.66 | 0.75 | 0.84 | 0.88 | 1.00 | 0.70 | 0.81 | 0.85 | 0.09 |
| BACH2_ADRB2 | 0.49 | 0.82 | 0.98 | 0.59 | 0.96 | 0.70 | 0.79 | 0.79 | 0.66 | 0.75 | 0.84 | 0.88 | 1.00 | 0.70 | 0.81 | 0.85 | 0.09 |
| BACH2_CD8A | 0.49 | 0.82 | 0.98 | 0.59 | 0.96 | 0.70 | 0.79 | 0.79 | 0.66 | 0.75 | 0.84 | 0.88 | 1.00 | 0.70 | 0.81 | 0.85 | 0.09 |
| BACH2_CST7 | 0.49 | 0.82 | 0.98 | 0.59 | 0.96 | 0.70 | 0.79 | 0.79 | 0.66 | 0.75 | 0.84 | 0.88 | 1.00 | 0.70 | 0.81 | 0.85 | 0.09 |
| BACH2_GZMA | 0.49 | 0.82 | 0.98 | 0.59 | 0.96 | 0.70 | 0.79 | 0.79 | 0.66 | 0.75 | 0.84 | 0.88 | 1.00 | 0.70 | 0.81 | 0.85 | 0.09 |
| BACH2_OASL | 0.49 | 0.82 | 0.98 | 0.59 | 0.96 | 0.70 | 0.79 | 0.79 | 0.66 | 0.75 | 0.84 | 0.88 | 1.00 | 0.70 | 0.81 | 0.85 | 0.09 |
| BACH2_PRDM1 | 0.49 | 0.82 | 0.98 | 0.59 | 0.96 | 0.70 | 0.79 | 0.79 | 0.66 | 0.75 | 0.84 | 0.88 | 1.00 | 0.70 | 0.81 | 0.85 | 0.09 |
| C6orf48_PPP2R2B | 0.49 | 0.82 | 0.98 | 0.59 | 0.96 | 0.70 | 0.79 | 0.79 | 0.66 | 0.75 | 0.84 | 0.88 | 1.00 | 0.70 | 0.81 | 0.85 | 0.09 |
| C6orf48_TPST2 | 0.49 | 0.82 | 0.98 | 0.59 | 0.96 | 0.70 | 0.79 | 0.79 | 0.66 | 0.75 | 0.84 | 0.88 | 1.00 | 0.70 | 0.81 | 0.85 | 0.09 |
| CAMK1D_FAM129A | 0.49 | 0.82 | 0.98 | 0.59 | 0.96 | 0.70 | 0.79 | 0.79 | 0.66 | 0.75 | 0.84 | 0.88 | 1.00 | 0.70 | 0.81 | 0.85 | 0.09 |
| CD93_FAM129A | 0.49 | 0.82 | 0.98 | 0.59 | 0.96 | 0.70 | 0.79 | 0.79 | 0.66 | 0.75 | 0.84 | 0.88 | 1.00 | 0.70 | 0.81 | 0.85 | 0.09 |
| EEF1G_CD8A | 0.49 | 0.82 | 0.98 | 0.59 | 0.96 | 0.70 | 0.79 | 0.79 | 0.66 | 0.75 | 0.84 | 0.88 | 1.00 | 0.70 | 0.81 | 0.85 | 0.09 |
| EEF1G_GFI1 | 0.49 | 0.82 | 0.98 | 0.59 | 0.96 | 0.70 | 0.79 | 0.79 | 0.66 | 0.75 | 0.84 | 0.88 | 1.00 | 0.70 | 0.81 | 0.85 | 0.09 |
| EIF2S3_PPP2R2B | 0.49 | 0.82 | 0.98 | 0.59 | 0.96 | 0.70 | 0.79 | 0.79 | 0.66 | 0.75 | 0.84 | 0.88 | 1.00 | 0.70 | 0.81 | 0.85 | 0.09 |
| EIF2S3_TPST2 | 0.49 | 0.82 | 0.98 | 0.59 | 0.96 | 0.70 | 0.79 | 0.79 | 0.66 | 0.75 | 0.84 | 0.88 | 1.00 | 0.70 | 0.81 | 0.85 | 0.09 |
| EPHX2_ADCY3 | 0.49 | 0.82 | 0.98 | 0.59 | 0.96 | 0.70 | 0.79 | 0.79 | 0.66 | 0.75 | 0.84 | 0.88 | 1.00 | 0.70 | 0.81 | 0.85 | 0.09 |
| EPHX2_ARNTL | 0.49 | 0.82 | 0.98 | 0.59 | 0.96 | 0.70 | 0.79 | 0.79 | 0.66 | 0.75 | 0.84 | 0.88 | 1.00 | 0.70 | 0.81 | 0.85 | 0.09 |
| EPHX2_FAM129A | 0.49 | 0.82 | 0.98 | 0.59 | 0.96 | 0.70 | 0.79 | 0.79 | 0.66 | 0.75 | 0.84 | 0.88 | 1.00 | 0.70 | 0.81 | 0.85 | 0.09 |
| EPHX2_PFKP | 0.49 | 0.82 | 0.98 | 0.59 | 0.96 | 0.70 | 0.79 | 0.79 | 0.66 | 0.75 | 0.84 | 0.88 | 1.00 | 0.70 | 0.81 | 0.85 | 0.09 |
| FLNB_ARNTL | 0.49 | 0.82 | 0.98 | 0.59 | 0.96 | 0.70 | 0.79 | 0.79 | 0.66 | 0.75 | 0.84 | 0.88 | 1.00 | 0.70 | 0.81 | 0.85 | 0.09 |
| FLNB_CD8A | 0.49 | 0.82 | 0.98 | 0.59 | 0.96 | 0.70 | 0.79 | 0.79 | 0.66 | 0.75 | 0.84 | 0.88 | 1.00 | 0.70 | 0.81 | 0.85 | 0.09 |
| FLNB_CYB561 | 0.49 | 0.82 | 0.98 | 0.59 | 0.96 | 0.70 | 0.79 | 0.79 | 0.66 | 0.75 | 0.84 | 0.88 | 1.00 | 0.70 | 0.81 | 0.85 | 0.09 |
| FLNB_PRDM1 | 0.49 | 0.82 | 0.98 | 0.59 | 0.96 | 0.70 | 0.79 | 0.79 | 0.66 | 0.75 | 0.84 | 0.88 | 1.00 | 0.70 | 0.81 | 0.85 | 0.09 |
| FLNB_PRKD2 | 0.49 | 0.82 | 0.98 | 0.59 | 0.96 | 0.70 | 0.79 | 0.79 | 0.66 | 0.75 | 0.84 | 0.88 | 1.00 | 0.70 | 0.81 | 0.85 | 0.09 |
| FLNB_TAP1 | 0.49 | 0.82 | 0.98 | 0.59 | 0.96 | 0.70 | 0.79 | 0.79 | 0.66 | 0.75 | 0.84 | 0.88 | 1.00 | 0.70 | 0.81 | 0.85 | 0.09 |
| FLNB_TPST2 | 0.49 | 0.82 | 0.98 | 0.59 | 0.96 | 0.70 | 0.79 | 0.79 | 0.66 | 0.75 | 0.84 | 0.88 | 1.00 | 0.70 | 0.81 | 0.85 | 0.09 |
| GNG7_GFI1 | 0.49 | 0.82 | 0.98 | 0.59 | 0.96 | 0.70 | 0.79 | 0.79 | 0.66 | 0.75 | 0.84 | 0.88 | 1.00 | 0.70 | 0.81 | 0.85 | 0.09 |
| GNG7_GPR56 | 0.49 | 0.82 | 0.98 | 0.59 | 0.96 | 0.70 | 0.79 | 0.79 | 0.66 | 0.75 | 0.84 | 0.88 | 1.00 | 0.70 | 0.81 | 0.85 | 0.09 |
| GNG7_KPNB1 | 0.49 | 0.82 | 0.98 | 0.59 | 0.96 | 0.70 | 0.79 | 0.79 | 0.66 | 0.75 | 0.84 | 0.88 | 1.00 | 0.70 | 0.81 | 0.85 | 0.09 |
| GNG7_LDLR | 0.49 | 0.82 | 0.98 | 0.59 | 0.96 | 0.70 | 0.79 | 0.79 | 0.66 | 0.75 | 0.84 | 0.88 | 1.00 | 0.70 | 0.81 | 0.85 | 0.09 |
| GNG7_OASL | 0.49 | 0.82 | 0.98 | 0.59 | 0.96 | 0.70 | 0.79 | 0.79 | 0.66 | 0.75 | 0.84 | 0.88 | 1.00 | 0.70 | 0.81 | 0.85 | 0.09 |
| GNG7_PRDM1 | 0.49 | 0.82 | 0.98 | 0.59 | 0.96 | 0.70 | 0.79 | 0.79 | 0.66 | 0.75 | 0.84 | 0.88 | 1.00 | 0.70 | 0.81 | 0.85 | 0.09 |
| GNG7_PRKD2 | 0.49 | 0.82 | 0.98 | 0.59 | 0.96 | 0.70 | 0.79 | 0.79 | 0.66 | 0.75 | 0.84 | 0.88 | 1.00 | 0.70 | 0.81 | 0.85 | 0.09 |
| HSD17B8_RARRES3 | 0.49 | 0.82 | 0.98 | 0.59 | 0.96 | 0.70 | 0.79 | 0.79 | 0.66 | 0.75 | 0.84 | 0.88 | 1.00 | 0.70 | 0.81 | 0.85 | 0.09 |
| ICAM2_OASL | 0.49 | 0.82 | 0.98 | 0.59 | 0.96 | 0.70 | 0.79 | 0.79 | 0.66 | 0.75 | 0.84 | 0.88 | 1.00 | 0.70 | 0.81 | 0.85 | 0.09 |
| ITPKB_GFI1 | 0.49 | 0.82 | 0.98 | 0.59 | 0.96 | 0.70 | 0.79 | 0.79 | 0.66 | 0.75 | 0.84 | 0.88 | 1.00 | 0.70 | 0.81 | 0.85 | 0.09 |
| LEF1_GFI1 | 0.49 | 0.82 | 0.98 | 0.59 | 0.96 | 0.70 | 0.79 | 0.79 | 0.66 | 0.75 | 0.84 | 0.88 | 1.00 | 0.70 | 0.81 | 0.85 | 0.09 |
| LEF1_PRDM1 | 0.49 | 0.82 | 0.98 | 0.59 | 0.96 | 0.70 | 0.79 | 0.79 | 0.66 | 0.75 | 0.84 | 0.88 | 1.00 | 0.70 | 0.81 | 0.85 | 0.09 |
| LEF1_PRKD2 | 0.49 | 0.82 | 0.98 | 0.59 | 0.96 | 0.70 | 0.79 | 0.79 | 0.66 | 0.75 | 0.84 | 0.88 | 1.00 | 0.70 | 0.81 | 0.85 | 0.09 |
| LEF1_RARRES3 | 0.49 | 0.82 | 0.98 | 0.59 | 0.96 | 0.70 | 0.79 | 0.79 | 0.66 | 0.75 | 0.84 | 0.88 | 1.00 | 0.70 | 0.81 | 0.85 | 0.09 |
| LEF1_ZBP1 | 0.49 | 0.82 | 0.98 | 0.59 | 0.96 | 0.70 | 0.79 | 0.79 | 0.66 | 0.75 | 0.84 | 0.88 | 1.00 | 0.70 | 0.81 | 0.85 | 0.09 |
| MLLT11_PPP2R2B | 0.49 | 0.82 | 0.98 | 0.59 | 0.96 | 0.70 | 0.79 | 0.79 | 0.66 | 0.75 | 0.84 | 0.88 | 1.00 | 0.70 | 0.81 | 0.85 | 0.09 |
| MZF1_OASL | 0.49 | 0.82 | 0.98 | 0.59 | 0.96 | 0.70 | 0.79 | 0.79 | 0.66 | 0.75 | 0.84 | 0.88 | 1.00 | 0.70 | 0.81 | 0.85 | 0.09 |
| NAALADL1_ZBP1 | 0.49 | 0.82 | 0.98 | 0.59 | 0.96 | 0.70 | 0.79 | 0.79 | 0.66 | 0.75 | 0.84 | 0.88 | 1.00 | 0.70 | 0.81 | 0.85 | 0.09 |
| NACA_C1QB | 0.49 | 0.82 | 0.98 | 0.59 | 0.96 | 0.70 | 0.79 | 0.79 | 0.66 | 0.75 | 0.84 | 0.88 | 1.00 | 0.70 | 0.81 | 0.85 | 0.09 |
| NACA_CST7 | 0.49 | 0.82 | 0.98 | 0.59 | 0.96 | 0.70 | 0.79 | 0.79 | 0.66 | 0.75 | 0.84 | 0.88 | 1.00 | 0.70 | 0.81 | 0.85 | 0.09 |
| NACA_CYB561 | 0.49 | 0.82 | 0.98 | 0.59 | 0.96 | 0.70 | 0.79 | 0.79 | 0.66 | 0.75 | 0.84 | 0.88 | 1.00 | 0.70 | 0.81 | 0.85 | 0.09 |
| NACA_PRDM1 | 0.49 | 0.82 | 0.98 | 0.59 | 0.96 | 0.70 | 0.79 | 0.79 | 0.66 | 0.75 | 0.84 | 0.88 | 1.00 | 0.70 | 0.81 | 0.85 | 0.09 |
| NET1_OASL | 0.49 | 0.82 | 0.98 | 0.59 | 0.96 | 0.70 | 0.79 | 0.79 | 0.66 | 0.75 | 0.84 | 0.88 | 1.00 | 0.70 | 0.81 | 0.85 | 0.09 |
| NOSIP_RARRES3 | 0.49 | 0.82 | 0.98 | 0.59 | 0.96 | 0.70 | 0.79 | 0.79 | 0.66 | 0.75 | 0.84 | 0.88 | 1.00 | 0.70 | 0.81 | 0.85 | 0.09 |
| PEX11B_GFI1 | 0.49 | 0.82 | 0.98 | 0.59 | 0.96 | 0.70 | 0.79 | 0.79 | 0.66 | 0.75 | 0.84 | 0.88 | 1.00 | 0.70 | 0.81 | 0.85 | 0.09 |
| PIK3IP1_CCL5 | 0.49 | 0.82 | 0.98 | 0.59 | 0.96 | 0.70 | 0.79 | 0.79 | 0.66 | 0.75 | 0.84 | 0.88 | 1.00 | 0.70 | 0.81 | 0.85 | 0.09 |
| PIK3IP1_PPP2R2B | 0.49 | 0.82 | 0.98 | 0.59 | 0.96 | 0.70 | 0.79 | 0.79 | 0.66 | 0.75 | 0.84 | 0.88 | 1.00 | 0.70 | 0.81 | 0.85 | 0.09 |
| PIK3IP1_TGFBR3 | 0.49 | 0.82 | 0.98 | 0.59 | 0.96 | 0.70 | 0.79 | 0.79 | 0.66 | 0.75 | 0.84 | 0.88 | 1.00 | 0.70 | 0.81 | 0.85 | 0.09 |
| PTOV1_FAM129A | 0.49 | 0.82 | 0.98 | 0.59 | 0.96 | 0.70 | 0.79 | 0.79 | 0.66 | 0.75 | 0.84 | 0.88 | 1.00 | 0.70 | 0.81 | 0.85 | 0.09 |
| PTOV1_PPP2R2B | 0.49 | 0.82 | 0.98 | 0.59 | 0.96 | 0.70 | 0.79 | 0.79 | 0.66 | 0.75 | 0.84 | 0.88 | 1.00 | 0.70 | 0.81 | 0.85 | 0.09 |
| RPL10A_ADRB2 | 0.49 | 0.82 | 0.98 | 0.59 | 0.96 | 0.70 | 0.79 | 0.79 | 0.66 | 0.75 | 0.84 | 0.88 | 1.00 | 0.70 | 0.81 | 0.85 | 0.09 |
| RPL10A_TPST2 | 0.49 | 0.82 | 0.98 | 0.59 | 0.96 | 0.70 | 0.79 | 0.79 | 0.66 | 0.75 | 0.84 | 0.88 | 1.00 | 0.70 | 0.81 | 0.85 | 0.09 |
| RPL22_GFI1 | 0.49 | 0.82 | 0.98 | 0.59 | 0.96 | 0.70 | 0.79 | 0.79 | 0.66 | 0.75 | 0.84 | 0.88 | 1.00 | 0.70 | 0.81 | 0.85 | 0.09 |
| RPL38_OASL | 0.49 | 0.82 | 0.98 | 0.59 | 0.96 | 0.70 | 0.79 | 0.79 | 0.66 | 0.75 | 0.84 | 0.88 | 1.00 | 0.70 | 0.81 | 0.85 | 0.09 |
| SERTAD2_CCL5 | 0.49 | 0.82 | 0.98 | 0.59 | 0.96 | 0.70 | 0.79 | 0.79 | 0.66 | 0.75 | 0.84 | 0.88 | 1.00 | 0.70 | 0.81 | 0.85 | 0.09 |
| SPINT2_OASL | 0.49 | 0.82 | 0.98 | 0.59 | 0.96 | 0.70 | 0.79 | 0.79 | 0.66 | 0.75 | 0.84 | 0.88 | 1.00 | 0.70 | 0.81 | 0.85 | 0.09 |
| SYPL1_OASL | 0.49 | 0.82 | 0.98 | 0.59 | 0.96 | 0.70 | 0.79 | 0.79 | 0.66 | 0.75 | 0.84 | 0.88 | 1.00 | 0.70 | 0.81 | 0.85 | 0.09 |
| TBC1D4_PPP2R2B | 0.49 | 0.82 | 0.98 | 0.59 | 0.96 | 0.70 | 0.79 | 0.79 | 0.66 | 0.75 | 0.84 | 0.88 | 1.00 | 0.70 | 0.81 | 0.85 | 0.09 |
| TMC6_CHST12 | 0.49 | 0.82 | 0.98 | 0.59 | 0.96 | 0.70 | 0.79 | 0.79 | 0.66 | 0.75 | 0.84 | 0.88 | 1.00 | 0.70 | 0.81 | 0.85 | 0.09 |
| TMEM39B_CD300A | 0.49 | 0.82 | 0.98 | 0.59 | 0.96 | 0.70 | 0.79 | 0.79 | 0.66 | 0.75 | 0.84 | 0.88 | 1.00 | 0.70 | 0.81 | 0.85 | 0.09 |
| TRAF3IP3_GFI1 | 0.49 | 0.82 | 0.98 | 0.59 | 0.96 | 0.70 | 0.79 | 0.79 | 0.66 | 0.75 | 0.84 | 0.88 | 1.00 | 0.70 | 0.81 | 0.85 | 0.09 |
| TRAF3IP3_OASL | 0.49 | 0.82 | 0.98 | 0.59 | 0.96 | 0.70 | 0.79 | 0.79 | 0.66 | 0.75 | 0.84 | 0.88 | 1.00 | 0.70 | 0.81 | 0.85 | 0.09 |
| VASH1_FAM129A | 0.49 | 0.82 | 0.98 | 0.59 | 0.96 | 0.70 | 0.79 | 0.79 | 0.66 | 0.75 | 0.84 | 0.88 | 1.00 | 0.70 | 0.81 | 0.85 | 0.09 |
| VPREB3_CCL5 | 0.49 | 0.82 | 0.98 | 0.59 | 0.96 | 0.70 | 0.79 | 0.79 | 0.66 | 0.75 | 0.84 | 0.88 | 1.00 | 0.70 | 0.81 | 0.85 | 0.09 |
| VPREB3_TAP1 | 0.49 | 0.82 | 0.98 | 0.59 | 0.96 | 0.70 | 0.79 | 0.79 | 0.66 | 0.75 | 0.84 | 0.88 | 1.00 | 0.70 | 0.81 | 0.85 | 0.09 |
| BACH2_EIF2AK2 | 0.57 | 0.77 | 0.95 | 0.65 | 0.82 | 0.88 | 0.89 | 0.68 | 0.69 | 0.77 | 0.82 | 0.84 | 0.95 | 1.00 | 0.61 | 0.85 | 0.08 |
| BACH2_RARRES3 | 0.57 | 0.77 | 0.95 | 0.65 | 0.82 | 0.88 | 0.89 | 0.68 | 0.69 | 0.77 | 0.82 | 0.84 | 0.95 | 1.00 | 0.61 | 0.85 | 0.08 |
| BACH2_TAP1 | 0.57 | 0.77 | 0.95 | 0.65 | 0.82 | 0.88 | 0.89 | 0.68 | 0.69 | 0.77 | 0.82 | 0.84 | 0.95 | 1.00 | 0.61 | 0.85 | 0.08 |
| BACH2_ZBP1 | 0.57 | 0.77 | 0.95 | 0.65 | 0.82 | 0.88 | 0.89 | 0.68 | 0.69 | 0.77 | 0.82 | 0.84 | 0.95 | 1.00 | 0.61 | 0.85 | 0.08 |
| C6orf48_CD300A | 0.57 | 0.77 | 0.95 | 0.65 | 0.82 | 0.88 | 0.89 | 0.68 | 0.69 | 0.77 | 0.82 | 0.84 | 0.95 | 1.00 | 0.61 | 0.85 | 0.08 |
| C6orf48_CST7 | 0.57 | 0.77 | 0.95 | 0.65 | 0.82 | 0.88 | 0.89 | 0.68 | 0.69 | 0.77 | 0.82 | 0.84 | 0.95 | 1.00 | 0.61 | 0.85 | 0.08 |
| C6orf48_GFI1 | 0.57 | 0.77 | 0.95 | 0.65 | 0.82 | 0.88 | 0.89 | 0.68 | 0.69 | 0.77 | 0.82 | 0.84 | 0.95 | 1.00 | 0.61 | 0.85 | 0.08 |
| CAMK1D_ZBP1 | 0.57 | 0.77 | 0.95 | 0.65 | 0.82 | 0.88 | 0.89 | 0.68 | 0.69 | 0.77 | 0.82 | 0.84 | 0.95 | 1.00 | 0.61 | 0.85 | 0.08 |
| CCR7_CHST12 | 0.57 | 0.77 | 0.95 | 0.65 | 0.82 | 0.88 | 0.89 | 0.68 | 0.69 | 0.77 | 0.82 | 0.84 | 0.95 | 1.00 | 0.61 | 0.85 | 0.08 |
| CD79B_GFI1 | 0.57 | 0.77 | 0.95 | 0.65 | 0.82 | 0.88 | 0.89 | 0.68 | 0.69 | 0.77 | 0.82 | 0.84 | 0.95 | 1.00 | 0.61 | 0.85 | 0.08 |
| CD79B_PPP2R2B | 0.57 | 0.77 | 0.95 | 0.65 | 0.82 | 0.88 | 0.89 | 0.68 | 0.69 | 0.77 | 0.82 | 0.84 | 0.95 | 1.00 | 0.61 | 0.85 | 0.08 |
| CD79B_TPST2 | 0.57 | 0.77 | 0.95 | 0.65 | 0.82 | 0.88 | 0.89 | 0.68 | 0.69 | 0.77 | 0.82 | 0.84 | 0.95 | 1.00 | 0.61 | 0.85 | 0.08 |
| CD93_ACSL1 | 0.57 | 0.77 | 0.95 | 0.65 | 0.82 | 0.88 | 0.89 | 0.68 | 0.69 | 0.77 | 0.82 | 0.84 | 0.95 | 1.00 | 0.61 | 0.85 | 0.08 |
| DHRS3_CHST12 | 0.57 | 0.77 | 0.95 | 0.65 | 0.82 | 0.88 | 0.89 | 0.68 | 0.69 | 0.77 | 0.82 | 0.84 | 0.95 | 1.00 | 0.61 | 0.85 | 0.08 |
| DPEP2_CD300A | 0.57 | 0.77 | 0.95 | 0.65 | 0.82 | 0.88 | 0.89 | 0.68 | 0.69 | 0.77 | 0.82 | 0.84 | 0.95 | 1.00 | 0.61 | 0.85 | 0.08 |
| EEF1G_PPP2R2B | 0.57 | 0.77 | 0.95 | 0.65 | 0.82 | 0.88 | 0.89 | 0.68 | 0.69 | 0.77 | 0.82 | 0.84 | 0.95 | 1.00 | 0.61 | 0.85 | 0.08 |
| EIF2S3_CD300A | 0.57 | 0.77 | 0.95 | 0.65 | 0.82 | 0.88 | 0.89 | 0.68 | 0.69 | 0.77 | 0.82 | 0.84 | 0.95 | 1.00 | 0.61 | 0.85 | 0.08 |
| EIF2S3_FAM129A | 0.57 | 0.77 | 0.95 | 0.65 | 0.82 | 0.88 | 0.89 | 0.68 | 0.69 | 0.77 | 0.82 | 0.84 | 0.95 | 1.00 | 0.61 | 0.85 | 0.08 |
| EPHX2_CST7 | 0.57 | 0.77 | 0.95 | 0.65 | 0.82 | 0.88 | 0.89 | 0.68 | 0.69 | 0.77 | 0.82 | 0.84 | 0.95 | 1.00 | 0.61 | 0.85 | 0.08 |
| EPHX2_FDFT1 | 0.57 | 0.77 | 0.95 | 0.65 | 0.82 | 0.88 | 0.89 | 0.68 | 0.69 | 0.77 | 0.82 | 0.84 | 0.95 | 1.00 | 0.61 | 0.85 | 0.08 |
| EPHX2_PRDM1 | 0.57 | 0.77 | 0.95 | 0.65 | 0.82 | 0.88 | 0.89 | 0.68 | 0.69 | 0.77 | 0.82 | 0.84 | 0.95 | 1.00 | 0.61 | 0.85 | 0.08 |
| EPHX2_RARRES3 | 0.57 | 0.77 | 0.95 | 0.65 | 0.82 | 0.88 | 0.89 | 0.68 | 0.69 | 0.77 | 0.82 | 0.84 | 0.95 | 1.00 | 0.61 | 0.85 | 0.08 |
| ETS1_GFI1 | 0.57 | 0.77 | 0.95 | 0.65 | 0.82 | 0.88 | 0.89 | 0.68 | 0.69 | 0.77 | 0.82 | 0.84 | 0.95 | 1.00 | 0.61 | 0.85 | 0.08 |
| FLNB_CD300A | 0.57 | 0.77 | 0.95 | 0.65 | 0.82 | 0.88 | 0.89 | 0.68 | 0.69 | 0.77 | 0.82 | 0.84 | 0.95 | 1.00 | 0.61 | 0.85 | 0.08 |
| FLNB_PXN | 0.57 | 0.77 | 0.95 | 0.65 | 0.82 | 0.88 | 0.89 | 0.68 | 0.69 | 0.77 | 0.82 | 0.84 | 0.95 | 1.00 | 0.61 | 0.85 | 0.08 |
| FLNB_SYT11 | 0.57 | 0.77 | 0.95 | 0.65 | 0.82 | 0.88 | 0.89 | 0.68 | 0.69 | 0.77 | 0.82 | 0.84 | 0.95 | 1.00 | 0.61 | 0.85 | 0.08 |
| FLNB_TGFBR3 | 0.57 | 0.77 | 0.95 | 0.65 | 0.82 | 0.88 | 0.89 | 0.68 | 0.69 | 0.77 | 0.82 | 0.84 | 0.95 | 1.00 | 0.61 | 0.85 | 0.08 |
| GNG7_CYB561 | 0.57 | 0.77 | 0.95 | 0.65 | 0.82 | 0.88 | 0.89 | 0.68 | 0.69 | 0.77 | 0.82 | 0.84 | 0.95 | 1.00 | 0.61 | 0.85 | 0.08 |
| GNG7_FAM129A | 0.57 | 0.77 | 0.95 | 0.65 | 0.82 | 0.88 | 0.89 | 0.68 | 0.69 | 0.77 | 0.82 | 0.84 | 0.95 | 1.00 | 0.61 | 0.85 | 0.08 |
| GNG7_GDPD5 | 0.57 | 0.77 | 0.95 | 0.65 | 0.82 | 0.88 | 0.89 | 0.68 | 0.69 | 0.77 | 0.82 | 0.84 | 0.95 | 1.00 | 0.61 | 0.85 | 0.08 |
| GNG7_GZMA | 0.57 | 0.77 | 0.95 | 0.65 | 0.82 | 0.88 | 0.89 | 0.68 | 0.69 | 0.77 | 0.82 | 0.84 | 0.95 | 1.00 | 0.61 | 0.85 | 0.08 |
| GNG7_IKBKG | 0.57 | 0.77 | 0.95 | 0.65 | 0.82 | 0.88 | 0.89 | 0.68 | 0.69 | 0.77 | 0.82 | 0.84 | 0.95 | 1.00 | 0.61 | 0.85 | 0.08 |
| GNG7_REC8 | 0.57 | 0.77 | 0.95 | 0.65 | 0.82 | 0.88 | 0.89 | 0.68 | 0.69 | 0.77 | 0.82 | 0.84 | 0.95 | 1.00 | 0.61 | 0.85 | 0.08 |
| IL4R_OASL | 0.57 | 0.77 | 0.95 | 0.65 | 0.82 | 0.88 | 0.89 | 0.68 | 0.69 | 0.77 | 0.82 | 0.84 | 0.95 | 1.00 | 0.61 | 0.85 | 0.08 |
| ITM2C_CD300A | 0.57 | 0.77 | 0.95 | 0.65 | 0.82 | 0.88 | 0.89 | 0.68 | 0.69 | 0.77 | 0.82 | 0.84 | 0.95 | 1.00 | 0.61 | 0.85 | 0.08 |
| ITM2C_OASL | 0.57 | 0.77 | 0.95 | 0.65 | 0.82 | 0.88 | 0.89 | 0.68 | 0.69 | 0.77 | 0.82 | 0.84 | 0.95 | 1.00 | 0.61 | 0.85 | 0.08 |
| LEF1_ARNTL | 0.57 | 0.77 | 0.95 | 0.65 | 0.82 | 0.88 | 0.89 | 0.68 | 0.69 | 0.77 | 0.82 | 0.84 | 0.95 | 1.00 | 0.61 | 0.85 | 0.08 |
| LEF1_IFI44 | 0.57 | 0.77 | 0.95 | 0.65 | 0.82 | 0.88 | 0.89 | 0.68 | 0.69 | 0.77 | 0.82 | 0.84 | 0.95 | 1.00 | 0.61 | 0.85 | 0.08 |
| LEF1_OASL | 0.57 | 0.77 | 0.95 | 0.65 | 0.82 | 0.88 | 0.89 | 0.68 | 0.69 | 0.77 | 0.82 | 0.84 | 0.95 | 1.00 | 0.61 | 0.85 | 0.08 |
| MED25_OASL | 0.57 | 0.77 | 0.95 | 0.65 | 0.82 | 0.88 | 0.89 | 0.68 | 0.69 | 0.77 | 0.82 | 0.84 | 0.95 | 1.00 | 0.61 | 0.85 | 0.08 |
| NAALADL1_PPP2R2B | 0.57 | 0.77 | 0.95 | 0.65 | 0.82 | 0.88 | 0.89 | 0.68 | 0.69 | 0.77 | 0.82 | 0.84 | 0.95 | 1.00 | 0.61 | 0.85 | 0.08 |
| NACA_GFI1 | 0.57 | 0.77 | 0.95 | 0.65 | 0.82 | 0.88 | 0.89 | 0.68 | 0.69 | 0.77 | 0.82 | 0.84 | 0.95 | 1.00 | 0.61 | 0.85 | 0.08 |
| NACA_NKG7 | 0.57 | 0.77 | 0.95 | 0.65 | 0.82 | 0.88 | 0.89 | 0.68 | 0.69 | 0.77 | 0.82 | 0.84 | 0.95 | 1.00 | 0.61 | 0.85 | 0.08 |
| NACA_RARRES3 | 0.57 | 0.77 | 0.95 | 0.65 | 0.82 | 0.88 | 0.89 | 0.68 | 0.69 | 0.77 | 0.82 | 0.84 | 0.95 | 1.00 | 0.61 | 0.85 | 0.08 |
| NACA_ZBP1 | 0.57 | 0.77 | 0.95 | 0.65 | 0.82 | 0.88 | 0.89 | 0.68 | 0.69 | 0.77 | 0.82 | 0.84 | 0.95 | 1.00 | 0.61 | 0.85 | 0.08 |
| NAP1L1_OASL | 0.57 | 0.77 | 0.95 | 0.65 | 0.82 | 0.88 | 0.89 | 0.68 | 0.69 | 0.77 | 0.82 | 0.84 | 0.95 | 1.00 | 0.61 | 0.85 | 0.08 |
| NOSIP_GFI1 | 0.57 | 0.77 | 0.95 | 0.65 | 0.82 | 0.88 | 0.89 | 0.68 | 0.69 | 0.77 | 0.82 | 0.84 | 0.95 | 1.00 | 0.61 | 0.85 | 0.08 |
| NOSIP_PPP2R2B | 0.57 | 0.77 | 0.95 | 0.65 | 0.82 | 0.88 | 0.89 | 0.68 | 0.69 | 0.77 | 0.82 | 0.84 | 0.95 | 1.00 | 0.61 | 0.85 | 0.08 |
| PEX11B_OASL | 0.57 | 0.77 | 0.95 | 0.65 | 0.82 | 0.88 | 0.89 | 0.68 | 0.69 | 0.77 | 0.82 | 0.84 | 0.95 | 1.00 | 0.61 | 0.85 | 0.08 |
| PLEKHB1_OASL | 0.57 | 0.77 | 0.95 | 0.65 | 0.82 | 0.88 | 0.89 | 0.68 | 0.69 | 0.77 | 0.82 | 0.84 | 0.95 | 1.00 | 0.61 | 0.85 | 0.08 |
| PTOV1_GDPD5 | 0.57 | 0.77 | 0.95 | 0.65 | 0.82 | 0.88 | 0.89 | 0.68 | 0.69 | 0.77 | 0.82 | 0.84 | 0.95 | 1.00 | 0.61 | 0.85 | 0.08 |
| RPL10A_OASL | 0.57 | 0.77 | 0.95 | 0.65 | 0.82 | 0.88 | 0.89 | 0.68 | 0.69 | 0.77 | 0.82 | 0.84 | 0.95 | 1.00 | 0.61 | 0.85 | 0.08 |
| RPL12_CCL5 | 0.57 | 0.77 | 0.95 | 0.65 | 0.82 | 0.88 | 0.89 | 0.68 | 0.69 | 0.77 | 0.82 | 0.84 | 0.95 | 1.00 | 0.61 | 0.85 | 0.08 |
| RPL12_GFI1 | 0.57 | 0.77 | 0.95 | 0.65 | 0.82 | 0.88 | 0.89 | 0.68 | 0.69 | 0.77 | 0.82 | 0.84 | 0.95 | 1.00 | 0.61 | 0.85 | 0.08 |
| RPL22_ACAT1 | 0.57 | 0.77 | 0.95 | 0.65 | 0.82 | 0.88 | 0.89 | 0.68 | 0.69 | 0.77 | 0.82 | 0.84 | 0.95 | 1.00 | 0.61 | 0.85 | 0.08 |
| RPL30_GFI1 | 0.57 | 0.77 | 0.95 | 0.65 | 0.82 | 0.88 | 0.89 | 0.68 | 0.69 | 0.77 | 0.82 | 0.84 | 0.95 | 1.00 | 0.61 | 0.85 | 0.08 |
| RPS5_GFI1 | 0.57 | 0.77 | 0.95 | 0.65 | 0.82 | 0.88 | 0.89 | 0.68 | 0.69 | 0.77 | 0.82 | 0.84 | 0.95 | 1.00 | 0.61 | 0.85 | 0.08 |
| RPS5_TPST2 | 0.57 | 0.77 | 0.95 | 0.65 | 0.82 | 0.88 | 0.89 | 0.68 | 0.69 | 0.77 | 0.82 | 0.84 | 0.95 | 1.00 | 0.61 | 0.85 | 0.08 |
| SAC3D1_OASL | 0.57 | 0.77 | 0.95 | 0.65 | 0.82 | 0.88 | 0.89 | 0.68 | 0.69 | 0.77 | 0.82 | 0.84 | 0.95 | 1.00 | 0.61 | 0.85 | 0.08 |
| SATB1_ZBP1 | 0.57 | 0.77 | 0.95 | 0.65 | 0.82 | 0.88 | 0.89 | 0.68 | 0.69 | 0.77 | 0.82 | 0.84 | 0.95 | 1.00 | 0.61 | 0.85 | 0.08 |
| SPINT2_FAM129A | 0.57 | 0.77 | 0.95 | 0.65 | 0.82 | 0.88 | 0.89 | 0.68 | 0.69 | 0.77 | 0.82 | 0.84 | 0.95 | 1.00 | 0.61 | 0.85 | 0.08 |
| SVIL_FAM129A | 0.57 | 0.77 | 0.95 | 0.65 | 0.82 | 0.88 | 0.89 | 0.68 | 0.69 | 0.77 | 0.82 | 0.84 | 0.95 | 1.00 | 0.61 | 0.85 | 0.08 |
| SYPL1_IFI16 | 0.57 | 0.77 | 0.95 | 0.65 | 0.82 | 0.88 | 0.89 | 0.68 | 0.69 | 0.77 | 0.82 | 0.84 | 0.95 | 1.00 | 0.61 | 0.85 | 0.08 |
| SYPL1_TANK | 0.57 | 0.77 | 0.95 | 0.65 | 0.82 | 0.88 | 0.89 | 0.68 | 0.69 | 0.77 | 0.82 | 0.84 | 0.95 | 1.00 | 0.61 | 0.85 | 0.08 |
| TCL1A_OASL | 0.57 | 0.77 | 0.95 | 0.65 | 0.82 | 0.88 | 0.89 | 0.68 | 0.69 | 0.77 | 0.82 | 0.84 | 0.95 | 1.00 | 0.61 | 0.85 | 0.08 |
| TMEM134_GFI1 | 0.57 | 0.77 | 0.95 | 0.65 | 0.82 | 0.88 | 0.89 | 0.68 | 0.69 | 0.77 | 0.82 | 0.84 | 0.95 | 1.00 | 0.61 | 0.85 | 0.08 |
| TRAF3IP3_RARRES3 | 0.57 | 0.77 | 0.95 | 0.65 | 0.82 | 0.88 | 0.89 | 0.68 | 0.69 | 0.77 | 0.82 | 0.84 | 0.95 | 1.00 | 0.61 | 0.85 | 0.08 |
| UBE2D2_GFI1 | 0.57 | 0.77 | 0.95 | 0.65 | 0.82 | 0.88 | 0.89 | 0.68 | 0.69 | 0.77 | 0.82 | 0.84 | 0.95 | 1.00 | 0.61 | 0.85 | 0.08 |
| VPREB3_CD300A | 0.57 | 0.77 | 0.95 | 0.65 | 0.82 | 0.88 | 0.89 | 0.68 | 0.69 | 0.77 | 0.82 | 0.84 | 0.95 | 1.00 | 0.61 | 0.85 | 0.08 |
| VPREB3_FAM129A | 0.57 | 0.77 | 0.95 | 0.65 | 0.82 | 0.88 | 0.89 | 0.68 | 0.69 | 0.77 | 0.82 | 0.84 | 0.95 | 1.00 | 0.61 | 0.85 | 0.08 |
| VPREB3_ZBP1 | 0.57 | 0.77 | 0.95 | 0.65 | 0.82 | 0.88 | 0.89 | 0.68 | 0.69 | 0.77 | 0.82 | 0.84 | 0.95 | 1.00 | 0.61 | 0.85 | 0.08 |
| WDR61_TPST2 | 0.57 | 0.77 | 0.95 | 0.65 | 0.82 | 0.88 | 0.89 | 0.68 | 0.69 | 0.77 | 0.82 | 0.84 | 0.95 | 1.00 | 0.61 | 0.85 | 0.08 |

[0402] The difference between the negative and positive mean in Table 5 is shown in the right hand column and derived markers are ordered from highest to lowest based on this difference. * Negative validation datasets 1-9 are, in order; GSE17755 (autoimmune disease), GSE25504 (neonatal sepsis), GSE33341 (bacterial infection), GSE40366 (age), GSE41752 (Lassa virus), GSE42834 (Tuberculosis, sarcoidosis, lung cancer), GSE52428 (influenza), GSE34205 (influenza), GSE34205 (respiratory syncytial virus). ¹ Positive validation datasets are, in order; GSE40366 (cytomegalovirus), GSE40366 (CMV for 90 year olds), GSE40396 (HHV6), GSE45919 (Epstein-Barr Virus), MARS (CMV, EBV, HSV1 and 2). The orientation of a derived biomarker does not affect diagnostic performance (that is, CCL5_FLNB has the same diagnostic performance as FLNB_CCL5).

TABLE 6
KEY HUMAN VIRAL PATHOGENS (BY VIRUS NAME
AND TYPE) THAT ARE KNOWN TO CAUSE SYSTEMIC
INFLAMMATION AND NON-SPECIFIC CLINICAL
SIGNS OF FEVER, RASH, AND ACHES

| Clinical Signs | Virus Name | Virus Type |
|---|---|---|
| Fever/Rash/Aches/ | Measles | Morbillivirus |
| Generalised | Hantavirus | Bunyavirus |
| | Cytomegalovirus | Herpesvirus |
| | Varicella Zoster Virus | Herpesvirus |
| | Herpes Simplex Virus | Herpevirus |
| | Epstein Barr Virus | Herpesvirus |
| | Parechovirus | Picornavirus |
| | Human immunodeficiency | Lentivirus |
| | virus | |
| | Hepatitis B virus | Orthohepadnavirus |
| | HTLV1 and 2 | Retrovirus |
| | Vaccinia virus | Poxvirus |
| | West Nile Virus | Flavivirus |
| | Coxsackie virus | Picornavirus |
| | Parvovirus B19 | Parvovirus |
| | Dengue | Flavivirus |

[0403] Underlined virus types in Table 6 are those demonstrably detected using the HVaSIRS biomarker signature

TABLE 7
COMMON HUMAN VIRUSES THAT CAUSE SIRS AND A VIREMIA AS
PART OF THEIR PATHOGENESIS AND AN ASSOCIATED REFERENCE

| Virus | Reference |
|---|---|
| Measles | de Vries R D, Mesman A W, Geijtenbeek T B H, |
| | Duprex W P, de Swart R L (2012) The |
| | pathogenesis of measles. Curr Opin Virol 2: |
| | 248-255. |
| Respiratory | Rohwedder A, Keminer O, Forster J, Schneider |
| Syncytial Virus (RSV) | K, Schneider E, et al. (1998) Detection of |
| | respiratory syncytial virus RNA in blood of |
| | neonates by polymerase chain reaction. J Med |
| | Virol 54: 320-327. |
| Influenza A and B | Wootton S H, Aguilera E A, Wanger A, Jewell A, |
| | Patel K, et al. (2014) Detection of NH1N1 |
| | influenza virus in nonrespiratory sites among |
| | children. Pediatr Infect Dis J 33: 95-96. |
| Hepatitis B virus | Pripuzova N, Wang R, Tsai S, Li B, Hung G-C, et |
| Hepatitis C virus | al. (2012) Development of Real-Time PCR Array |
| Human immunodeficiency | for Simultaneous Detection of Eight Human |
| virus 1 and 2 | Blood-Borne Viral Pathogens. PLoS ONE 7: |
| HTLV1 and 2 | e43246. |
| Vaccinia virus | |
| West Nile Virus | |
| Cytomegalovirus | Johnson G, Nelson S, Petric M, Tellier R (2000) |
| Varicella Zoster Virus | Comprehensive PCR-based assay for detection |
| Herpes Simplex Virus | and species identification of human |
| Epstein Barr Virus | herpesviruses. Journal of Clinical Microbiology |
| | 38: 3274-3279. |
| Rhinovirus | Xatzipsalti M, Kyrana S, Tsolia M, Psarras S, |
| | Bossios A, et al. (2005) Rhinovirus viremia in |
| | children with respiratory infections. American |
| | Journal of Respiratory and Critical Care Medicine |
| | 172: 1037-1040. |
| Adenovirus | Dunn J J, Miller M B (2014) Emerging respiratory |
| Bocavirus | viruses other than influenza. Clin Lab Med 34: |
| Human Coronavirus | 409-430. |
| types 229e, OC43, HKU1, | |
| NL-63SARS coronavirus | |
| Hantavirus | Evander M, Eriksson I, Pettersson L, Juto P, |
| | Ahlm C, et al. (2007) Puumala Hantavirus |
| | Viremia Diagnosed by Real-Time Reverse |
| | Transcriptase PCR Using Samples from Patients |
| | with Hemorrhagic Fever and Renal Syndrome. |
| | Journal of Clinical Microbiology 45: 2491-2497. |
| Enterovirus | Cheng H-Y, Huang Y-C, Yen T-Y, Hsia S-H, |
| | Hsieh Y-C, et al. (2014) The correlation between |
| | the presence of viremia and clinical severity in |
| | patients with enterovirus 71 infection: a multi- |
| | center cohort study. BMC Infect Dis 14: 417. |
| Parechovirus | Abed Y, Boivin G (2006) Human parechovirus |
| | infections in Canada. Emerging Infectious |
| | Diseases 12: 969. |
| BK virus | Erard V, Storer B, Corey L, Nollkamper J, Huang |
| | M-L, et al. (2004) BK virus infection in |
| | hematopoietic stem cell transplant recipients: |
| | frequency, risk factors, and association with |
| | postengraftment hemorrhagic cystitis. Clin |
| | Infect Dis 39: 1861-1865. |
| Parainfluenza | Gerkowicz T, Szajner-Milart I, Szczygielska J, |
| virus 1, 2, 3 and 4 | Blaszynska M, Karska M, et al. (1979) Clinical |
| | manifestations of viremia during infections |
| | caused by adenoviruses and parainfluenza |
| | viruses. Pediatr Pol 54: 41-45. |
| SARS coronavirus | Wang W K, Fang C T, Chen H L, Yang C F, Chen |
| | Y C, et al. (2005) Detection of Severe Acute |
| | Respiratory Syndrome Coronavirus RNA in |
| | Plasma during the Course of Infection. Journal |
| | of Clinical Microbiology 43: 962-965. |
| TTV (torque teno virus) | Walton A H, Muenzer J T, Rasche D, Boomer J S, |
| | Sato B, et al. (2014) Reactivation of multiple |
| | viruses in patients with sepsis. PLoS ONE 9: |
| | e98819. |
| Coxsackie virus | Clem A L, Sims J, Telang S, Eaton J W, Chesney J |
| | (2007) Virus detection and identification using |
| | random multiplex (RT)-PCR with 3′-locked |
| | random primers. Virol J 4: 65. |
| Parvovirus B19 | Juhl D, Steppat D, Görg S, Hennig H (2014) |
| | Parvovirus B19 Infections and Blood Counts in |
| | Blood Donors. Transfus Med Hemother 41: 6-6. |
| Dengue | La Cruz Hernandez De S I, Flores-Aguilar H, |
| | Gonzalez-Mateos S, Lopez-Martinez I, Ortiz- |
| | Navarrete V, et al. (2013) Viral load in patients |
| | infected with dengue is modulated by the |
| | presence of anti-dengue IgM antibodies. J Clin |
| | Virol 58: 258-261. |

[0404] HVaSIRS biomarkers are useful in differentiating a SIRS caused by herpesviruses from a SIRS caused by other viruses listed in this table.

TABLE 8
COMMON HUMAN VIRUSES THAT CAUSE SIRS AND A VIREMIA
AS PART OF THEIR PATHOGENESIS AND FOR WHICH
THERE ARE SPECIFIC ANTI-VIRAL TREATMENTS

| Virus | Reference |
|---|---|
| Influenza A and B | Wootton S H, Aguilera E A, Wanger A, Jewell A, |
| | Patel K, et al. (2014) Detection of NH1N1 |
| | influenza virus in nonrespiratory sites among |
| | children. Pediatr Infect Dis J 33: 95-96. |
| Hepatitis B virus | Pripuzova N, Wang R, Tsai S, Li B, Hung G-C, et |
| Hepatitis C virus | al. (2012) Development of Real-Time PCR Array |
| Human immunodeficiency | for Simultaneous Detection of Eight Human |
| virus 1 and 2 | Blood-Borne Viral Pathogens. PLoS ONE 7: |
| | e43246. |
| Cytomegalovirus | Johnson G, Nelson S, Petric M, Tellier R (2000) |
| Varicella Zoster Virus | Comprehensive PCR-based assay for detection |
| Herpes Simplex Virus | and species identification of human |
| Epstein Barr Virus | herpesviruses. Journal of Clinical Microbiology |
| | 38: 3274-3279. |

[0405] HVaSIRS biomarkers are useful in differentiating a SIRS caused by herpes viruses from a SIRS caused by other viruses listed in this table. As such, appropriate anti-viral treatment decisions can be made.

TABLE 9
COMMON AND LESS COMMON VIRUSES ASSOCIATED
WITH PNEUMONIA IN ADULTS AND CHILDREN.

| | Less Common |
|---|---|
| | (or in specific |
| Common | hosts or settings) |
| Respiratory Syncytial Virus (RSV) | Measles |
| Influenza A and B | Cytomegalovirus |
| Human Metapneumovirus | Varicella Zoster Virus |
| Adenovirus | Herpes Simplex Virus |
| Parainfluenza virus 1, 2, 3 and 4 | Epstein Barr Virus |
| Human Coronavirus types 229e, | Hantavirus |
| OC43, HKU1, NL-63 | |
| Rhinovirus | Enterovirus |
| Bocavirus | Parechovirus |
| | SARS Coronavirus |

[0406] HVaSIRS biomarkers are useful in differentiating a pneumonia caused by herpesviruses from a pneumonia caused by other viruses listed in this table. As such, appropriate anti-viral treatment decisions can be made. Herpesviruses are underlined.

TABLE 10
LISTS OF BIOMARKERS ACCORDING TO THEIR CORRELATION TO EITHER CCLT, FLNB,
PPP2R2B, GNG7, CASZ1, OR VASH1 (GROUPS A-F).

| Group A | | | Group B | | | Group C | | |
|---|---|---|---|---|---|---|---|---|
| Correlation | | DNA | Correlation | | DNA | Correlation | | SEQ |
| CCL5 | Symbol | SEQ ID | FLNB | Symbol | SEQ ID | PPP2R2B | Symbol | SEQ ID |
| 0.55 | GZMA | 60 | 0.54 | EPHX2 | 47 | 0.46 | RUNX3 | 132 |
| 0.50 | TGFBR3 | 155 | 0.50 | CCR7 | 24 | 0.45 | GPR56 | 58 |
| 0.47 | CD8A | 29 | 0.47 | MAL | 83 | 0.37 | LBH | 76 |
| 0.38 | PABPC4 | 97 | 0.46 | LEF1 | 79 | 0.30 | POP5 | 105 |
| 0.37 | CHST12 | 31 | 0.46 | TRAF3IP3 | 163 | 0.30 | SYNE2 | 145 |
| 0.36 | NKG7 | 94 | 0.45 | PIK3IP1 | 103 | 0.27 | TPST2 | 162 |
| 0.35 | SYT11 | 147 | 0.45 | ITM2C | 71 | 0.26 | RPL36 | 126 |
| 0.34 | RARRES3 | 114 | 0.45 | LDLRAP1 | 78 | 0.26 | GALNT10 | 53 |
| 0.30 | RPL12 | 121 | 0.43 | NOSIP | 95 | 0.26 | GF11 | 55 |
| 0.28 | KIF13B | 73 | 0.41 | ARHGEF18 | 9 | 0.25 | MZF1 | 87 |
| 0.28 | ICAM2 | 65 | 0.40 | SATB1 | 134 | 0.24 | SREBF1 | 142 |
| 0.27 | ADRB2 | 5 | 0.40 | ITPKB | 72 | 0.21 | AKAP11 | 7 |
| 0.25 | MRPS18B | 86 | 0.40 | TBC1D4 | 150 | 0.21 | CAMK1D | 20 |
| 0.25 | RPL8 | 128 | 0.40 | FLT3LG | 52 | 0.18 | CYB561 | 36 |
| 0.22 | RPS11 | 129 | 0.39 | DHRS3 | 39 | 0.17 | BTG3 | 17 |
| 0.22 | SLAMF7 | 138 | 0.39 | RBM4B | 116 | 0.15 | CST7 | 35 |
| 0.21 | PRKD2 | 108 | 0.37 | HSD17B8 | 64 | 0.15 | SVIL | 144 |
| 0.20 | FDFT1 | 50 | 0.36 | MLLT11 | 85 | 0.13 | EIF2AK2 | 44 |
| 0.20 | ATP2B4 | 12 | 0.36 | TMC6 | 156 | 0.11 | ARNTL | 10 |
| 0.19 | RPL38 | 127 | 0.35 | PLEKHB1 | 104 | 0.10 | ZBP1 | 173 |
| 0.18 | BTG1 | 16 | 0.35 | ALDOC | 8 | 0.10 | ADCY7 | 4 |
| 0.16 | DNPEP | 40 | 0.34 | RPL22 | 123 | 0.10 | SYPL1 | 146 |
| Group A | | | Group B | | | Group C | | |
| 0.16 | NAP1L1 | 90 | 0.34 | EEF1G | 42 | 0.03 | HERC6 | 62 |
| 0.12 | RABGAP1L | 112 | 0.34 | TOP2B | 160 | | | |
| 0.11 | ACAT1 | 1 | 0.34 | BACH2 | 13 | | | |
| | | | 0.33 | BNIP3 | 15 | | | |
| | | | 0.33 | ADSL | 6 | | | |
| | | | 0.32 | GRWD1 | 59 | | | |
| | | | 0.32 | RPL10A | 119 | | | |
| | | | 0.32 | TMEM134 | 157 | | | |
| | | | 0.32 | ETS1 | 48 | | | |
| | | | 0.32 | CRY2 | 34 | | | |
| | | | 0.31 | SERBP1 | 135 | | | |
| | | | 0.31 | RPS5 | 130 | | | |
| | | | 0.30 | ZW10 | 174 | | | |
| | | | 0.30 | EIF4B | 46 | | | |
| | | | 0.27 | PEX11B | 99 | | | |
| | | | 0.27 | PHB2 | 102 | | | |
| | | | 0.27 | SERPINE2 | 136 | | | |
| | | | 0.27 | SRM | 143 | | | |
| | | | 0.26 | LSM7 | 81 | | | |
| | | | 0.26 | RPL15 | 122 | | | |
| | | | 0.26 | RBM17 | 115 | | | |
| | | | 0.26 | DGKA | 38 | | | |
| | | | 0.26 | PTOV1 | 109 | | | |
| | | | 0.25 | HIC2 | 63 | | | |
| | | | 0.24 | NET1 | 92 | | | |
| | | | 0.24 | XPC | 172 | | | |
| | | | 0.24 | SLC5A6 | 139 | | | |
| | | | 0.24 | SERTAD2 | 137 | | | |
| | | | 0.23 | TMEM39B | 158 | | | |
| | | | 0.23 | RPL27 | 124 | | | |
| | | | 0.22 | RPL11 | 120 | | | |
| | | | 0.20 | C6orf48 | 19 | | | |
| | | | 0.19 | WDR61 | 171 | | | |
| | | | 0.19 | PFKP | 101 | | | |
| | | | 0.18 | EIF2S3 | 45 | | | |
| | | | 0.18 | NECAP2 | 91 | | | |
| | | | 0.18 | RPL30 | 125 | | | |
| | | | 0.18 | NACA | 89 | | | |
| | | | 0.17 | NGFRAP1 | 93 | | | |
| | | | 0.16 | RPS9 | 131 | | | |
| | | | 0.16 | RALA | 113 | | | |
| | | | 0.15 | COX4I1 | 33 | | | |
| | | | 0.14 | UBE2D2 | 165 | | | |
| | | | 0.02 | VPS35 | 170 | | | |
| Group D | | | Group E | | | Group F | | |
| Correlation | | DNA | Correlation | | DNA | Correlation | | DNA |
| GNG7 | Symbol | SEQ ID | CASZ1 | Symbol | SEQ ID | VASH1 | Symbol | SEQ ID |
| 0.41 | CD79B | 28 | 0.27 | TMUB2 | 159 | 0.28 | GPR162 | 57 |
| 0.40 | CD79A | 27 | 0.27 | ARSB | 11 | 0.27 | NAALADL1 | 88 |
| 0.38 | VPREB3 | 169 | 0.23 | C1QB | 18 | 0.23 | LTBP3 | 82 |
| 0.36 | TCL1A | 153 | 0.22 | PRKL | 100 | 0.22 | REC8 | 117 |
| 0.34 | LAMA5 | 75 | 0.21 | EHD1 | 43 | 0.20 | CD37 | 26 |
| 0.26 | BCL11A | 14 | 0.20 | PRDM1 | 107 | 0.18 | TPK1 | 161 |
| 0.25 | TCF4 | 152 | 0.19 | IKBKG | 69 | 0.17 | GDPD5 | 54 |
| 0.20 | DPEP2 | 41 | 0.19 | TAP1 | 149 | 0.17 | SAC3D1 | 133 |
| 0.17 | RPAIN | 118 | 0.18 | TANK | 148 | 0.13 | SPINT2 | 140 |
| 0.15 | RAB3GAP1 | 111 | .017 | PARP3 | 98 | 0.10 | CD93 | 30 |
| 0.14 | MED25 | 84 | 0.16 | OASL | 96 | | | |
| 0.17 | LRMP | 80 | 0.16 | ADCY3 | 3 | | | |
| | | | 0.16 | FAM129A | 49 | | | |
| | | | 0.16 | SQRDL | 141 | | | |
| | | | 0.15 | UBR2 | 167 | | | |
| | | | 0.15 | ITITM1 | 68 | | | |
| | | | 0.14 | CYLD | 37 | | | |
| | | | 0.13 | ACSL1 | 2 | | | |
| | | | 0.13 | PXN | 110 | | | |
| | | | 0.13 | UBE2L6 | 166 | | | |
| | | | 0.13 | IL4R | 70 | | | |
| | | | 0.12 | COL17A1 | 32 | | | |
| | | | Group E | | | | | |
| | | | 0.12 | TXN | 164 | | | |
| | | | 0.10 | CD300A | 25 | | | |
| | | | 0.10 | LDLR | 77 | | | |
| | | | 0.09 | TBK1 | 151 | | | |
| | | | 0.07 | HERC5 | 61 | | | |
| | | | 0.05 | TDRD7 | 154 | | | |
| | | | 0.05 | KPNB1 | 74 | | | |
| | | | 0.03 | IFI44 | 67 | | | |
| | | | 0.02 | CASP4 | 21 | | | |
| | | | −0.01 | IFI16 | 66 | | | |

TABLE 11
SEQUENCE ID NUMBERS, BIOMARKER GENE SYMBOLS, AND ENSEMBL TRANSCRIPT IDs

| SEQ | | | SEQ | | | SEQ | | |
|---|---|---|---|---|---|---|---|---|
| ID DNA | Symbol | Ensembl ID | ID DNA | Symbol | Ensembl ID | ID DNA | Symbol | Ensembl ID |
| 1 | ACAT1 | ENST00000265838 | 25 | CD300A | ENST00000360141 | 49 | FAM129A | ENST00000367511 |
| 2 | ACSL1 | ENST00000281455 | 26 | CD37 | ENST00000323906 | 50 | FDFT1 | ENST00000220584 |
| 3 | ADCY3 | ENST00000260600 | 27 | CD79A | ENST00000221972 | 51 | FLNB | ENST00000295956 |
| 4 | ADCY7 | ENST00000254235 | 28 | CD79B | ENST00000006750 | 52 | FLT3LG | ENST00000597551 |
| 5 | ADRB2 | ENST00000305988 | 29 | CD8A | ENST00000283635 | 53 | GALNT10 | ENST00000297107 |
| 6 | ADSL | ENST00000623063 | 30 | CD93 | ENST00000246006 | 54 | GDPD5 | ENST00000336898 |
| 7 | AKAP11 | ENST00000025301 | 31 | CHST12 | ENST00000618655 | 55 | GFI1 | ENST00000294702 |
| 8 | ALDOC | ENST00000226253 | 32 | COL17A1 | ENST00000353479 | 56 | GNG7 | ENST00000382159 |
| 9 | ARHGEF18 | ENST00000319670 | 33 | COX4I1 | ENST00000253452 | 57 | GPR162 | ENST00000428545 |
| 10 | ARNTL | ENST00000389707 | 34 | CRY2 | ENST00000616623 | 58 | GPR56 | ENST00000567835 |
| 11 | ARSB | ENST00000264914 | 35 | CST7 | ENST00000480798 | 59 | GRWD1 | ENST00000253237 |
| 12 | ATP2B4 | ENST00000357681 | 36 | CYB561 | ENST00000360793 | 60 | GZMA | ENST00000274306 |
| 13 | BACH2 | ENST00000257749 | 37 | CYLD | ENST00000311559 | 61 | HERC5 | ENST00000264350 |
| 14 | BCL11A | ENST00000356842 | 38 | DGKA | ENST00000331886 | 62 | HERC6 | ENST00000264346 |
| 15 | BNIP3 | ENST00000368636 | 39 | DHRS3 | ENST00000616661 | 63 | HIC2 | ENST00000407464 |
| 16 | BTG1 | ENST00000256015 | 40 | DNPEP | ENST00000273075 | 64 | HSD17B8 | ENST00000454191 |
| 17 | BTG3 | ENST00000348354 | 41 | DPEP2 | ENST00000393847 | 65 | ICAM2 | ENST00000449662 |
| 18 | C1QB | ENST00000314933 | 42 | EEF1G | ENST00000329251 | 66 | IFI16 | ENST00000368131 |
| 19 | C6orf48 | ENST00000423640 | 43 | EHD1 | ENST00000320631 | 67 | IFI44 | ENST00000370747 |
| 20 | CAMK1D | ENST00000378845 | 44 | EIF2AK2 | ENST00000395127 | 68 | IFITM1 | ENST00000408968 |
| 21 | CASP4 | ENST00000444739 | 45 | EIF2S3 | ENST00000253039 | 69 | IKBKG | ENST00000611071 |
| 22 | CASZ1 | ENST00000344008 | 46 | EIF4B | ENST00000262056 | 70 | IL4R | ENST00000395762 |
| 23 | CCL5 | ENST00000603197 | 47 | EPHX2 | ENST00000521400 | 71 | ITM2C | ENST00000326427 |
| 24 | CCR7 | ENST00000246657 | 48 | ETS1 | ENST00000319397 | 72 | ITPKB | ENST00000429204 |
| 73 | KIF13B | ENST00000524189 | 100 | PFKL | ENST00000349048 | 127 | RPL38 | ENST00000311111 |
| 74 | KPNB1 | ENST00000290158 | 101 | PFKP | ENST00000381125 | 128 | RPL8 | ENST00000262584 |
| 75 | LAMA5 | ENST00000252999 | 102 | PHB2 | ENST00000535923 | 129 | RPS11 | ENST00000270625 |
| 76 | LBH | ENST00000395323 | 103 | PIK3IP1 | ENST00000215912 | 130 | RPS5 | ENST00000196551 |
| 77 | LDLR | ENST00000558518 | 104 | PLEKHB1 | ENST00000354190 | 131 | RPS9 | ENST00000616082 |
| 78 | LDLRAP1 | ENST00000374338 | 105 | POP5 | ENST00000357500 | 132 | RUNX3 | ENST00000308873 |
| 79 | LEF1 | ENST00000265165 | 106 | PPP2R2B | ENST00000394414 | 133 | SAC3D1 | ENST00000398846 |
| 80 | LRMP | ENST00000354454 | 107 | PRDM1 | ENST00000369096 | 134 | SATB1 | ENST00000338745 |
| 81 | LSM7 | ENST00000252622 | 108 | PRKD2 | ENST00000433867 | 135 | SERBP1 | ENST00000370994 |
| 82 | LTBP3 | ENST00000322147 | 109 | PTOV1 | ENST00000391842 | 136 | SERPINE2 | ENST00000258405 |
| 83 | MAL | ENST00000309988 | 110 | PXN | ENST00000424649 | 137 | SERTAD2 | ENST00000313349 |
| 84 | MED25 | ENST00000312865 | 111 | RAB3GAP1 | ENST00000264158 | 138 | SLAMF7 | ENST00000368043 |
| 85 | MLLT11 | ENST00000368921 | 112 | RABGAP1L | ENST00000251507 | 139 | SLC5A6 | ENST00000310574 |
| 86 | MRPS18B | ENST00000259873 | 113 | RALA | ENST00000005257 | 140 | SPINT2 | ENST00000301244 |
| 87 | MZF1 | ENST00000599369 | 114 | RARRES3 | ENST00000255688 | 141 | SQRDL | ENST00000260324 |
| 88 | NAALADL1 | ENST00000358658 | 115 | RBM17 | ENST00000379888 | 142 | SREBF1 | ENST00000261646 |
| 89 | NACA | ENST00000356769 | 116 | RBM4B | ENST00000310046 | 143 | SRM | ENST00000376957 |
| 90 | NAP1L1 | ENST00000261182 | 117 | REC8 | ENST00000611366 | 144 | SVIL | ENST00000375400 |
| 91 | NECAP2 | ENST00000337132 | 118 | RPAIN | ENST00000381209 | 145 | SYNE2 | ENST00000344113 |
| 92 | NET1 | ENST00000380359 | 119 | RPL10A | ENST00000322203 | 146 | SYPL1 | ENST00000011473 |
| 93 | NGFRAP1 | ENST00000372635 | 120 | RPL11 | ENST00000374550 | 147 | SYT11 | ENST00000368324 |
| 94 | NKG7 | ENST00000221978 | 121 | RPL12 | ENST00000361436 | 148 | TANK | ENST00000259075 |
| 95 | NOSIP | ENST00000596358 | 122 | RPL15 | ENST00000611050 | 149 | TAP1 | ENST00000440894 |
| 96 | OASL | ENST00000257570 | 123 | RPL22 | ENST00000234875 | 150 | TBC1D4 | ENST00000377636 |
| 97 | PABPC4 | ENST00000372857 | 124 | RPL27 | ENST00000253788 | 151 | TBK1 | ENST00000331710 |
| 98 | PARP3 | ENST00000431474 | 125 | RPL30 | ENST00000287038 | 152 | TCF4 | ENST00000356073 |
| 99 | PEX11B | ENST00000369306 | 126 | RPL36 | ENST00000394580 | 153 | TCL1A | ENST00000402399 |
| 154 | TDRD7 | ENST00000355295 | 161 | TPK1 | ENST00000360057 | 168 | VASH1 | ENST00000167106 |
| 155 | TGFBR3 | ENST00000212355 | 162 | TPST2 | ENST00000338754 | 169 | VPREB3 | ENST00000248948 |
| 156 | TMC6 | ENST00000322914 | 163 | TRAF3IP3 | ENST00000367025 | 170 | VPS35 | ENST00000299138 |
| 157 | TMEM134 | ENST00000308022 | 164 | TXN | ENST00000374517 | 171 | WDR61 | ENST00000267973 |
| 158 | TMEM39B | ENST00000336294 | 165 | UBE2D2 | ENST00000398733 | 172 | XPC | ENST00000285021 |
| 159 | TMUB2 | ENST00000357984 | 166 | UBE2L6 | ENST00000287156 | 173 | ZBP1 | ENST00000371173 |
| 160 | TOP2B | ENST00000435706 | 167 | UBR2 | ENST00000372899 | 174 | ZW10 | ENST00000200135 |

TABLE 12
SEQUENCE ID NUMBERS, BIOMARKER GENE SYMBOLS, AND DATABASE ACCESSION IDs

| SEQID | | | SEQID | | | SEQID | | |
|---|---|---|---|---|---|---|---|---|
| AA | Symbol | Accession | AA | Symbol | Accession | AA | Symbol | Accession |
| 175 | ACAT1 | NP_000010 | 199 | CD300A | NP_009192 | 223 | FAM129A | NP_443198 |
| 176 | ACSL1 | NP_001986 | 200 | CD37 | NP_001765 | 224 | FDFT1 | NP_004453 |
| 177 | ADCY3 | NP_004027 | 201 | CD79A | NP_001774 | 225 | FLNB | NP_001448 |
| 178 | ADCY7 | NP_001105 | 202 | CD79B | NP_000617 | 226 | FLT3LG | NP_001450 |
| 179 | ADRB2 | NP_000015 | 203 | CD8A | NP_001759 | 227 | GALNT10 | NP_938080 |
| 180 | ADSL | NP_000017 | 204 | CD93 | NP_036204 | 228 | GDPD5 | NP_110419 |
| 181 | AKAP11 | NP_057332 | 205 | CHST12 | NP_061111 | 229 | GFI1 | NP_005254 |
| 182 | ALDOC | NP_005156 | 206 | COL17A1 | NP_000485 | 230 | GNG7 | NP_443079 |
| 183 | ARHGEF18 | NP_056133 | 207 | COX4I1 | NP_001852 | 231 | GPR162 | NP_055264 |
| 184 | ARNTL | NP_001169 | 208 | CRY2 | NP_066940 | 232 | GPR56 | NP_005673 |
| 185 | ARSB | NP_000037 | 209 | CST7 | NP_003641 | 233 | GRWD1 | NP_113673 |
| 186 | ATP2B4 | NP_001675 | 210 | CYB561 | NP_001906 | 234 | GZMA | NP_006135 |
| 187 | BACH2 | NP_068585 | 211 | CYLD | NP_056062 | 235 | HERC5 | NP_057407 |
| 188 | BCL11A | NP_060484 | 212 | DGKA | NP_001336 | 236 | HERC6 | NP_060382 |
| 189 | BNIP3 | NP_004043 | 213 | DHRS3 | NP_004744 | 237 | HIC2 | NP_055909 |
| 190 | BTG1 | NP_001722 | 214 | DNPEP | NP_036232 | 238 | HSD17B8 | NP_055049 |
| 191 | BTG3 | NP_006797 | 215 | DPEP2 | NP_071750 | 239 | ICAM2 | NP_000864 |
| 192 | C1QB | NP_000482 | 216 | EEF1G | NP_001395 | 240 | IFI16 | NP_005522 |
| 193 | C6orf48 | NP_001035527 | 217 | EHD1 | NP_006786 | 241 | IFI44 | NP_006408 |
| 194 | CAMK1D | NP_065130 | 218 | EIF2AK2 | NP_002750 | 242 | IFITM1 | NP_003632 |
| 195 | CASP4 | NP_001216 | 219 | EIF2S3 | NP_001406 | 243 | IKBKG | NP_003630 |
| 196 | CASZ1 | NP_060236 | 220 | EIF4B | NP_001408 | 244 | IL4R | NP_000409 |
| 197 | CCL5 | NP_002976 | 221 | EPHX2 | NP_001970 | 245 | ITM2C | NP_112188 |
| 198 | CCR7 | NP_001829 | 222 | ETS1 | NP_005229 | 246 | ITPKB | NP_002212 |
| 247 | KIF13B | NP_056069 | 275 | PFKP | NP_002618 | 303 | RPS11 | NP_001006 |
| 248 | KPNB1 | NP_002256 | 276 | PHB2 | NP_001138303 | 304 | RPS5 | NP_001000 |
| 249 | LAMA5 | NP_005551 | 277 | PIK3IP1 | NP_443112 | 305 | RPS9 | NP_001004 |
| 250 | LBH | NP_112177 | 278 | PLEKHB1 | NP_067023 | 306 | RUNX3 | NP_004341 |
| 251 | LDLR | NP_000518 | 279 | POP5 | NP_057002 | 307 | SAC3D1 | NP_037431 |
| 252 | LDLRAP1 | NP_056442 | 280 | PPP2R2B | NP_858060 | 308 | SATB1 | NP_002962 |
| 253 | LEF1 | NP_057353 | 281 | PRDM1 | NP_001189 | 309 | SERBP1 | NP_056455 |
| 254 | LRMP | NP_006143 | 282 | PRKD2 | NP_057541 | 310 | SERPINE2 | NP_006207 |
| 255 | LSM7 | NP_057283 | 283 | PTOV1 | NP_059128 | 311 | SERTAD2 | NP_055570 |
| 256 | LTBP3 | NP_066548 | 284 | PXN | NP_002850 | 312 | SLAMF7 | NP_067004 |
| 257 | MAL | NP_002362 | 285 | RAB3GAP1 | NP_036365 | 313 | SLC5A6 | NP_066918 |
| 258 | MED25 | NP_112235 | 286 | RABGAP1L | NP_055672 | 314 | SPINT2 | NP_066925 |
| 259 | MLLT11 | NP_006809 | 287 | RALA | NP_005393 | 315 | SQRDL | NP_067022 |
| 260 | MRPS18B | NP_054765 | 288 | RARRES3 | NP_004576 | 316 | SREBF1 | NP_004167 |
| 261 | MZF1 | NP_003413 | 289 | RBM17 | NP_116294 | 317 | SRM | NP_003123 |
| 262 | NAALADL1 | NP_005459 | 290 | RBM4B | NP_113680 | 318 | SVIL | NP_003165 |
| 263 | NACA | NP_001106673 | 291 | REC8 | NP_005123 | 319 | SYNE2 | NP_055995 |
| 264 | NAP1L1 | NP_004528 | 292 | RPAIN | NP_001028174 | 320 | SYPL1 | NP_006745 |
| 265 | NECAP2 | NP_060560 | 293 | RPL10A | NP_009035 | 321 | SYT11 | NP_689493 |
| 266 | NET1 | NP_005854 | 294 | RPL11 | NP_000966 | 322 | TANK | NP_004171 |
| 267 | NGFRAP1 | NP_055195 | 295 | RPL12 | NP_000967 | 323 | TAP1 | NP_000584 |
| 268 | NKG7 | NP_005592 | 296 | RPL15 | NP_002939 | 324 | TBC1D4 | NP_055647 |
| 269 | NOSIP | NP_057037 | 297 | RPL22 | NP_000974 | 325 | TBK1 | NP_037386 |
| 270 | OASL | NP_003724 | 298 | RPL27 | NP_000979 | 326 | TCF4 | NP_003190 |
| 271 | PABPC4 | NP_003810 | 299 | RPL30 | NP_000980 | 327 | TCL1A | NP_068801 |
| 272 | PARP3 | NP_005476 | 300 | RPL36 | NP_056229 | 328 | TDRD7 | NP_055105 |
| 273 | PEX11B | NP_003837 | 301 | RPL38 | NP_000990 | 329 | TGFBR3 | NP_003234 |
| 274 | PFKL | NP_002617 | 302 | RPL8 | NP_000964 | 330 | TMC6 | NP_009198 |
| 331 | TMEM134 | NP_079400 | 337 | TRAF3IP3 | NP_079504 | 343 | VPREB3 | NP_037510 |
| 332 | TMEM39B | NP_060526 | 338 | TXN | NP_003320 | 344 | VPS35 | NP_060676 |
| 333 | TMUB2 | NP_077012 | 339 | UBE2D2 | NP_003330 | 345 | WDR61 | NP_079510 |
| 334 | TOP2B | NP_001059 | 340 | UBE2L6 | NP_004214 | 346 | XPC | NP_004619 |
| 335 | TPK1 | NP_071890 | 341 | UBR2 | NP_056070 | 347 | ZBP1 | NP_110403 |
| 336 | TPST2 | NP_003586 | 342 | VASH1 | NP_055724 | 348 | ZW10 | NP_004715 |

The application's sequence listing, which the Patent Office published only in electronic form, follows.

SEQUENCE LISTING (348 sequences)

SEQ ID NO: 1 - DNA, 1284 bp, Homo sapiens
atggctgtgctggcggcacttctgcgcagcggcgcccgcagccgcagccccctgctccggaggctggtgcaggaaataagatatgtggaacggagttatgtatcaaaacccactttgaaggaagtggtcatagtaagtgctacaagaacacccattggatcttttttaggcagcctttccttgctgccagccactaagcttggttccattgcaattcagggagccattgaaaaggcagggattccaaaagaagaagtgaaagaagcatacatgggtaatgttctacaaggaggtgaaggacaagctcctacaaggcaggcagtattgggtgcaggcttacctatttctactccatgtaccaccataaacaaagtttgtgcttcaggaatgaaagccatcatgatggcctctcaaagtcttatgtgtggacatcaggatgtgatggtggcaggtgggatggagagcatgtccaatgttccatatgtaatgaacagaggatcaacaccatatggtggggtaaagcttgaagatttgattgtaaaagacgggctaactgatgtctacaataaaattcatatgggcagctgtgctgagaatacagcaaagaagctgaatattgcacgaaatgaacaggacgcttatgctattaattcttataccagaagtaaagcagcatgggaagctgggaaatttggaaatgaagttattcctgtcacagttacagtaaaaggtcaaccagatgtagtggtgaaagaagatgaagaatataaacgtgttgattttagcaaagttccaaagctgaagacagttttccagaaagaaaatggcacagtaacagctgccaatgccagtacactgaatgatggagcagctgctctggttctcatgacggcagatgcagcgaagaggctcaatgttacaccactggcaagaatagtagcatttgctgacgctgctgtagaacctattgattttccaattgctcctgtatatgctgcatctatggttcttaaagatgtgggattgaaaaaagaagatattgcaatgtgggaagtaaatgaagcctttagtctggttgtactagcaaacattaaaatgttggagattgatccccaaaaagtgaatatcaatggaggagctgtttctctgggacatccaattgggatgtctggagccaggattgttggtcatttgactcatgccttgaagcaaggagaatacggtcttgccagtatttgcaatggaggaggaggtgcttctgccatgctaattcagaagctgtag

SEQ ID NO: 2 - DNA, 2097 bp, Homo sapiens
atgcaagcccatgagctgttccggtattttcgaatgccagagctggttgacttccgacagtacgtgcgtactcttccgaccaacacgcttatgggcttcggagcttttgcagcactcaccaccttctggtacgccacgagacccaaacccctgaagccgccatgcgacctctccatgcagtcagtggaagtggcgggtagtggtggtgcacgaagatccgcactacttgacagcgacgagcccttggtgtatttctatgatgatgtcacaacattatacgaaggtttccagaggggaatacaggtgtcaaataatggcccttgtttaggctctcggaaaccagaccaaccctatgaatggctttcatataaacaggttgcagaattgtcggagtgcataggctcagcactgatccagaagggcttcaagactgccccagatcagttcattggcatctttgctcaaaatagacctgagtgggtgattattgaacaaggatgctttgcttattcgatggtgatcgttccactttatgatacccttggaaatgaagccatcacgtacatagtcaacaaagctgaactctctctggtttttgttgacaagccagagaaggccaaactcttattagagggtgtagaaaataagttaataccaggccttaaaatcatagttgtcatggatgcctacggcagtgaactggtggaacgaggccagaggtgtggggtggaagtcaccagcatgaaggcgatggaggacctgggaagagccaacagacggaagcccaagcctccagcacctgaagatcttgcagtaatttgtttcacaagtggaactacaggcaaccccaaaggagcaatggtcactcaccgaaacatagtgagcgattgttcagcttttgtgaaagcaacagagaatacagtcaatccttgcccagatgatactttgatatctttcttgcctctcgcccatatgtttgagagagttgtagagtgtgtaatgctgtgtcatggagctaaaatcggatttttccaaggagatatcaggctgctcatggatgacctcaaggtgcttcaacccactgtcttccccgtggttccaagactgctgaaccggatgtttgaccgaattttcggacaagcaaacaccacgctgaagcgatggctcttggactttgcctccaagaggaaagaagcagagcttcgcagcggcatcatcagaaacaacagcctgtgggaccggctgatcttccacaaagtacagtcgagcctgggcggaagagtccggctgatggtgacaggagccgccccggtgtctgccactgtgctgacgttcctcagagcagccctgggctgtcagttttatgaaggatacggacagacagagtgcactgccgggtgctgcctgaccatgcctggagactggaccgcaggccatgttggggccccgatgccgtgcaatttgataaaacttgttgatgtggaagaaatgaattacatggctgccgagggcgagggcgaggtgtgtgtgaaagggccaaatgtatttcagggctacttgaaggacccagcgaaaacagcagaagctttggacaaagacggctggttacacacaggggacattggaaaatggttaccaaatggcaccttgaaaattatcgaccggaaaaagcacatatttaagctggcacaaggagaatacatagcccctgaaaagattgaaaatatctacatgcgaagtgagcctgttgctcaggtgtttgtccacggagaaagcctgcaggcatttctcattgcaattgtggtaccagatgttgagacattatgttcctgggcccaaaagagaggatttgaagggtcgtttgaggaactgtgcagaaataaggatgtcaaaaaagctatcctcgaagatatggtgagacttgggaaggattctggtctgaaaccatttgaacaggtcaaaggcatcacattgcaccctgaattattttctatcgacaatggccttctgactccaacaatgaaggcgaaaaggccagagctgcggaactatttcaggtcgcagatagatgacctctattccactatcaaggtttag

SEQ ID NO: 3 - DNA, 3435 bp, Homo sapiens
atgccgaggaaccagggcttctccgagcccgaatactcggccgagtactcagccgagtactccgtcagcctgccctccgaccctgaccgcggggtgggccggacccatgaaatctcggtccggaactcgggctcctgcctgtgcctgcctcgcttcatgcggctgactttcgtgccggagtccttggagaacctctaccagacctacttcaaaaggcagcgccacgagaccctgctggtgctggtggtctttgcagccctctttgactgctacgtggtggtcatgtgtgctgtggtcttctccagcgacaagctggcttccctcgccgtggctggaattggactggtgttggacatcatcctcttcgtgctctgcaaaaaggggctgctcccggaccgggtcacccgcagagtgctgccctacgtgctgtggctgctcataaccgcccagatcttctcctacctgggcctgaacttcgcgcgtgcccacgcggctagtgacacggtgggctggcaggtcttctttgtcttctccttcttcatcacgctgcccctcagcctcagccccatcgtgatcatctccgtggtctcctgtgtggtgcacacgttggtcctgggggtcaccgtggcccagcagcagcaggaggagctcaaggggatgcagctgctgcgggagatcctggccaacgtcttcctctacctgtgcgccatcgctgtgggcatcatgtcctactacatggctgaccgcaagcaccgcaaggccttcctggaggcccgccagtcgctggaggtgaagatgaacctggaagagcagagccagcagcaggagaacctcatgctttccatcctgcccaagcacgtggctgacgagatgctgaaagacatgaagaaagacgagagccagaaggaccagcagcagttcaacaccatgtacatgtaccgtcacgagaacgtcagcatcctctttgccgacatcgtgggctttacccagctgtcttctgcctgcagtgcccaggagcttgtgaagctgctcaacgagctctttgcccgctttgacaagctggcagctaaataccaccagctgcggattaagatcctgggcgactgctactactgcatctgcggcttgcccgactaccgggaggaccacgccgtctgctccatcctcatggggctggccatggtggaggccatctcgtatgtgcgggagaagaccaagactggggtggacatgcgtgtgggggtgcacacgggcaccgtgctggggggcgtcctgggccagaagcgctggcagtacgacgtgtggtcgactgatgtcactgtagccaacaagatggaggccggcggcatccctgggcgcgtgcacatctcccagagcaccatggactgcctgaaaggggagtttgatgtggagccaggcgatgggggcagccgctgtgattacctagaagagaagggtattgaaacctacctcatcattgcctccaagccagaggtgaagaaaacagccacccagaatggcctcaatggctcggccctgcccaatggagcaccagcttcctcaaagtccagctcccctgccctcattgagaccaaggagcccaacgggagtgcccacagcagtgggtccacgtcggagaagcccgaggagcaggatgcccaggccgacaacccctcattccccaacccacgccggaggctgcgcctgcaggacctggctgaccgagtggtggatgcctctgaagatgagcacgagctcaaccagctgctcaacgaggccctgcttgagcgagagtccgcccaagtagtaaagaagagaaacaccttcctcttgtccatgcggttcatggaccccgagatggaaacccgctactcggtggagaaggagaagcagagtggggctgccttcagctgctcctgcgtcgtcctgctctgcacggccctggtcgagatactcatcgacccctggctaatgacaaactatgtgaccttcatggtgggggagattctgctcctcatcctgaccatctgctccctggctgccatctttccccgggcctttcctaagaagcttgtggccttctcaacttggattgaccggacccgctgggccaggaacacctgggccatgctcgccatcttcatcctggtgatggcaaatgtcgtggacatgctcagctgtctccagtactacacgggacccagcaatgcaacggcagggatggaaacggagggcagctgcctggagaaccccaagtattacaactatgtggccgtgctgtccctcatcgccaccatcatgctggtgcaggtcagccacatggtgaagctcacgctcatgctgctcgtcgcaggcgccgtggccaccatcaacctctatgcctggcgtcccgtctttgatgaatacgaccacaagcgttttcgggagcacgacttacctatggtggccttagagcagatgcaaggattcaaccctgggctcaatggcactgacaggctgcccctggtgccttccaagtactctatgacggtgatggtgttcctcatgatgctcagcttctactacttctcccgccacgtagaaaaactggcacggacacttttcttgtggaagattgaggtccacgaccagaaggaacgtgtctatgagatgcgacgctggaacgaggccttggtcaccaacatgttgcctgagcacgtggcacgccatttcctggggtccaagaagagagatgaggagctgtatagccagacgtatgatgagattggagtcatgtttgcctccctgcccaactttgctgacttctacacagaggagagcatcaacaatggtggtattgagtgtctgcgtttcctcaatgaaatcatctcagattttgactctctcctggacaatcccaagttccgggtgatcaccaagatcaaaaccattggcagcacgtatatggcggcttcaggagtcacccccgatgtcaacaccaatggctttgccagctccaacaaggaagacaagtccgagagagagcgctggcagcacctggctgacctggccgacttcgcgctggccatgaaggatacgctcaccaacatcaacaaccagtccttcaataacttcatgctgcgcataggcatgaacaaaggcggggttctggctggggtcatcggagcccggaaaccacactacgacatctggggcaatacagtcaatgtagccagcaggatggagtccacgggggtcatgggcaacattcaggtggtagaagaaacccaagtcatcctccgagagtacggcttccgctttgtgaggcgaggccccatctttgtgaaggggaagggggagctgctgaccttcttcttgaaggggcgggataagctagccaccttccccaatggcccctctgtcacactgccccaccaggtggtggacaactcctga

SEQ ID NO: 4 - DNA, 3243 bp, Homo sapiens
atgccagccaaggggcgctacttcctcaacgagggcgaggagggccctgaccaagatgcgctctacgagaagtaccagctcaccagccagcatgggccgctgctgctcacgctcctgctggtggccgccactgcctgcgtggccctcatcatcattgccttcagccagggggacccctccagacaccaggccattctgggcatggcgttcctggtgctggcggtgtttgcggccctctctgtgctgatgtacgtcgagtgtctcctgcggcgctggctcagggccttggcgctgctcacctgggcctgcttggtggcgctgggctatgtgctggtgttcgacgcatggacaaaggcggcctgtgcgtgggagcaggtgcccttcttcctgttcattgtcttcgtggtgtacacactactgcccttcagcatgcggggcgctgtcgccgttggggccgtctccactgcctcccacctcctggtgctcggttctttgatgggaggcttcacgacacccagtgtccgggtggggctgcagctgctggccaacgcagtcatcttcctgtgtgggaacctgacaggcgccttccacaagcaccaaatgcaggatgcatcccgggacctcttcacctacactgtgaagtgcatccagatccgccggaagctgcgcatcgagaagcgccagcaggagaacctgctgctgtcagtgcttccggcccacatctccatgggcatgaagctggccatcatcgaacggctcaaggagcatggtgaccgtcgctgcatgcctgacaacaacttccacagcctctacgtcaagaggcaccagaatgtcagcatcctctatgcggacatcgtgggcttcacgcagctggccagcgactgttctcccaaggagctggtggtggtgctgaatgagctctttggcaagttcgaccagatcgccaaggccaacgagtgcatgcgaatcaagatcctcggcgactgctactactgtgtatcgggcctgcccgtgtcgctgcctacccacgcccggaactgcgtgaagatggggctggacatgtgccaggccatcaagcaggtgcgggaggccacgggcgtggacatcaacatgcgtgtgggcatacactcggggaatgtgctgtgcggggtcatcgggctgcgcaagtggcagtatgacgtgtggtcccacgacgtgtccctggccaaccggatggaggcagccggagtacccggccgggtgcacatcacggaggccacgctaaagcacctggacaaggcgtacgaggtggaggatgggcacgggcagcagcgggacccctacctcaaggagatgaacatccgcacctacctggtcatcgacccccggagccagcagccacccccgcccagccaacacctccccaggcccaagggggacgcggccctgaagatgcgggcgtcagtgcgcatgacccggtacctcgagtcctggggggcggcacggccctttgcacatctcaaccaccgtgagagcgtgagcagtggtgagacccacgtccccaacgggcggaggcctaagagcgttccccagcgccaccgccggaccccagacagaagcatgtcccccaaggggcggtcggaggatgactcgtacgatgacgagatgctgtcagccattgaggggctcagctccacgaggccctgctgctccaagtccgatgacttctacacctttgggtccatcttcctggagaagggctttgagcgcgagtaccgcctggcacccatcccccgggcccgccacgactttgcctgcgccagcctgatcttcgtctgcatcctgctcgtccatgtcctgctcatgcccaggacggcggcactgggtgtgtccttcgggctggtggcctgtgtactggggctggtgctgggcctgtgctttgccaccaagttctcgaggtgctgcccagctcgggggacgctctgcactatctctgagagggtggagacacagcccctgctgaggctgaccctggccgtcctgaccatcggcagcctgctcactgtggccatcatcaacctgcccctgatgcctttccaagttccagagctgcctgttggcaatgagacaggcctactggccgcgagcagcaagacaagagccctgtgtgagcccctcccgtactacacctgcagctgtgtcctgggcttcatcgcctgctcggtcttcctgaggatgagcctggagccaaaggttgtgctgctgacagtggccctggtggcctacctggtgctcttcaacctctccccatgctggcagtgggactgctgcggccaaggcctgggcaacctcaccaagcccaacggcaccaccagtggcacccctagctgttcctggaaggacctgaagaccatgaccaatttctacctggtcctgttctacatcaccctgcttacactctccagacagattgactattactgccgcttggactgcctatggaagaagaagttcaagaaggagcacgaggagtttgagaccatggagaacgtgaaccgccttcttctggagaacgtcctgccagcccacgtggctgcccactttatcggtgacaagttaaacgaggactggtaccatcagtcctatgactgcgtctgtgtcatgtttgcctccgtgccggacttcaaagtgttctacacagagtgcgatgtcaacaaagaagggctggagtgcctacgcctgctcaatgagatcattgccgacttcgacgagctcctactgaagcccaagttcagcggcgtggagaagatcaagaccatcggcagcacgtacatggcagctgcagggctcagcgtcgcctcagggcacgagaaccaggagctggagcggcagcatgcccacattggtgtcatggtggagttcagcatcgccctgatgagtaagctggacggcatcaacaggcactccttcaactccttccgcctccgcgtcggcataaaccatgggcctgtgattgctggagtgattggggcccgaaaacctcagtatgacatctggggaaacactgtcaatgtggccagccgaatggaaagcactggagaacttgggaaaatccaggttaccgaggagacctgcaccatcctccagggcctcgggtactcttgtgaatgccgtggcctgatcaacgtcaaaggcaaaggcgagctgaggacttactttgtctgtacggacactgccaagtttcaggggctggggctgaactga

SEQ ID NO: 5 - DNA, 1242 bp, Homo sapiens
atggggcaacccgggaacggcagcgccttcttgctggcacccaatggaagccatgcgccggaccacgacgtcacgcaggaaagggacgaggtgtgggtggtgggcatgggcatcgtcatgtctctcatcgtcctggccatcgtgtttggcaatgtgctggtcatcacagccattgccaagttcgagcgtctgcagacggtcaccaactacttcatcacttcactggcctgtgctgatctggtcatgggcctggcagtggtgccctttggggccgcccatattcttatgaaaatgtggacttttggcaacttctggtgcgagttttggacttccattgatgtgctgtgcgtcacggccagcattgagaccctgtgcgtgatcgcagtggatcgctactttgccattacttcacctttcaagtaccagagcctgctgaccaagaataaggcccgggtgatcattctgatggtgtggattgtgtcaggccttacctccttcttgcccattcagatgcactggtaccgggccacccaccaggaagccatcaactgctatgccaatgagacctgctgtgacttcttcacgaaccaagcctatgccattgcctcttccatcgtgtccttctacgttcccctggtgatcatggtcttcgtctactccagggtctttcaggaggccaaaaggcagctccagaagattgacaaatctgagggccgcttccatgtccagaaccttagccaggtggagcaggatgggcggacggggcatggactccgcagatcttccaagttctgcttgaaggagcacaaagccctcaagacgttaggcatcatcatgggcactttcaccctctgctggctgcccttcttcatcgttaacattgtgcatgtgatccaggataacctcatccgtaaggaagtttacatcctcctaaattggataggctatgtcaattctggtttcaatccccttatctactgccggagcccagatttcaggattgccttccaggagcttctgtgcctgcgcaggtcttctttgaaggcctatgggaatggctactccagcaacggcaacacaggggagcagagtggatatcacgtggaacaggagaaagaaaataaactgctgtgtgaagacctcccaggcacggaagactttgtgggccatcaaggtactgtgcctagcgataacattgattcacaagggaggaattgtagtacaaatgactcactgctgtaa

SEQ ID NO: 6 - DNA, 1455 bp, Homo sapiens
atggcggctggaggcgatcatggttcgcccgacagctaccgctcacctcttgcctcccgctatgccagcccggagatgtgcttcgtgtttagcgacaggtataaattccggacatggcggcagctgtggctgtggctggcggaggccgagcagacattgggtttgcctatcacagatgaacaaatccaggagatgaaatcaaacctggagaacatcgacttcaagatggcagctgaggaagagaaacgtttacgacatgatgtgatggctcacgtgcacacatttggccactgctgtccaaaagctgcaggcattattcaccttggtgctacttcttgctatgttggagacaatactgacttgattattcttagaaatgcacttgacctgcttttgccaaagcttgccagagtgatctctcggcttgccgactttgctaaggaacgagccagtctacccacattaggtttcacacatttccagcctgcacagctgaccacagttgggaaacgttgctgtctttggattcaggatctttgcatggatctccagaacttgaagcgtgtccgagatgacctgcgcttccggggagtaaagggtaccactggcactcaggccagtttcctgcagctctttgagggagatgaccataaggtagagcagcttgacaagatggtgacagaaaaggcaggatttaagagagctttcatcatcacagggcagacatatacacgaaaagtggatattgaagtactgtctgtgctggctagcttgggggcatcagtgcacaagatttgcaccgacatacgcctcctggcaaacctcaaggagatggaggaaccctttgaaaaacagcagattggctcaagtgcgatgccatataagcggaatcccatgcgttcagaacgttgctgcagtcttgcccgccacctgatgacccttgtcatggacccgctacagacagcatctgtccagtggtttgaacgcacactggatgatagtgccaaccgacggatctgtttggccgaggcatttcttaccgcagatactatattgaatacgctgcagaacatttctgaaggattggtcgtgtaccccaaagtaattgaacggcgcattcggcaagagctgcctttcatggccacagagaacatcatcatggccatggtcaaagctggaggtagccgccaggattgccatgagaaaatcagagtgctttctcagcaggcagcttctgtggttaagcaggaagggggtgacaatgacctcatagagcgtatccaggttgatgcctacttcagtcccattcactcccagttggatcatttactggatccttcttctttcactggtcgtgcctcccagcaggtgcagagattcttagaagaggaggtgtatcccctgttaaaaccatatgaaagcgtgatgaaggtgaaagcagaattatgtctgtag

SEQ ID NO: 7 - DNA, 5706 bp, Homo sapiens
atggcgactttcagaaacaatcacatgaagactaaagcatctgtcagaaaaagcttcagtgaagatgtgttccagtctgtaaagtctttattgcagagtcagaaggaactatgcagtgtaacagcagaggactgtttacagcaggatgagcatgccaatttaactgaggtcacatttctgggttttaatgaagagacagatgctgctcatatacaggatttagctgcagtttctttggaacttccagatattctgaattcactccacttctgcagtctaaatgaaaatgaaattatttgtatgaagaatataaataaaccattagatataagcagtgatcctctaaatcagagtcatccttctggaatgctttgtgtcatgagagtgtcacctacatcaccaagacttaggattgattttatctttagtctcctaagtaaatatgctactggtataaggtacaccttggacacattcttgcatcagaagcaccaacttgagaccactgatgaagatgatgatgatactaaccagtctgtgtcatccatagaggatgactttgtcactgcttttgagcacttagaagaggaagagacttcaaagccatacaatgatggaatgaacattactgtgctaaggagccagtgtgatgctgcttcccagacggttactggtcatcatttagaaacccatgatttaaagattctcattagctctggacagcagaagtcattggctaaaccctcaacttcctcagtgaatgtcctgggacataaagaactaccttctgtgaaaacttcagtcacaacatcaatttcagagccttggacccaaaggagtttctataggtcatctaatgcttcagataaagatagtgatttacagaaaacatttttttcgtcttctcctgcctactcatctgaatcagaatgttcaagtccaagtcctgttattttcttggatgaagagggatatcaaaaaagcttaaaagcaaaacttgagctgcctaaaattcctgtgatgaaagatgatatagaggattcagactcagaagtaagtgaattttttgatagttttgatcagtttgatgaactagaacaaactttagagacttgcctgtttaacaaagatcccgtcatagggaagtcatcgcagaggaaagggcacaaacatggaaagtcatgtatgaatcctcaaaaattcaagtttgatcgtccagctctcccagctaatgttagaaagccaactcctcgtaaaccagaatctccatatggtaacctgtgtgatgctccggattctcctcgcccagtgaaggcatcaagggaagatagtggtttatttagtcctattcgatcctctgcttttagtcctcttggaggctgtactccagctgaatgtttttgccaaacagatattggtggagataggattcatgaaaatcatgattctgtttattacacctatgaagactatgcaaaaagcatttcatgtgaagtactaggctcagttcttcgtacccaccatactaataccctatcaaatattaacagtattaaacatggagaaaataaaactgtaacttttaagcatggaaaccttgatcaaaaaaataaatctaaaaataaatccttaatgattaaagatagcattcaaaaatttgcagcagatcttgtggaaaaaagttttggcagtgcatttaaagacttacagaaaggagtctcttcatgtaccaatgctttgtaccacttagccatcaaattgacatcatctgttttgcagatggcatttgatgagctgagaaggcagcgtgcattttcactaaaagaacgtgccattagtggcctggctaactttttggtgagtgaagctttatcaaatgccttaaaagatttacagtatgtaaagaagcagatattcacaaacacagttgctaggtttgctgcagatcttgctgaagagcttgtttttgaaggcatcatggaggtgtgtcagttttcatatcctcaaacgcctgcatctccacagtgtgggtcgtttgactttgaagacaaagtagtgaagttgtatgcaaaagatttgtctgaatctgtaatacaggaagcattcattgagctatcacaagttgatgtgacctttacaacaaaggcagcagttagtgtctctacggataatatcaagtatgtgagtgcagaaagtgtagtgccatcgacacaggctgtcacgttttccccttcttttcacaatcaagcaattatggtgacaaaaccagtgcaggaatataaaaaggaatacacagtgcagcaggccttgttttgtacttctggaattgttacttctataccggtgcccttggcaggaagtgcccttctcccatatcatatttcatctactgcatgtcaggccaaggctcatctgtcatctgatgatagtaattcaaatggtgattctgcccaagtgcatattgccacaaaaaacagagaagaaaaagcagcttgtctcagaaatatttgtttaccttcagaacacaatccaggtaatcagaatgattttaaaccaactaatgacgatattgaaatgcagagttcctcaaaattaccaaatgatcctgcaattattagcaacttttctgcagcagtggtgcatacgatagtaaatgaaactttagagtcaatgacatcattggaagttacaaaaatggttgatgaacgtacagattatttaactaaatctttaaaggagaaaacccctccattttcccactgtgatcaggcagtgctgcaatgcagtgaagctagtagcaataaggacatgtttgctgaccggttatctaaatctattattaaacattccatagataagagcaaatcagtgatcccaaatatagataaaaatgcagtatacaaggaaagcttgcctgtttctggagaagaatcacagttgacaccagaaaagtctcccaaatttcctgactctcagaatcagttaactcactgctcactttcagctgcaaaggattgtgttccagaatgtaaagtttctatggttcatggatcctccctagagacactgccatcttgtccagctgtgacaggtcagaaatctgacttgaaggaatctgctaaggatcaaccactgaaaaagcataacttgaatagtacatcacttgaggccttgtcttttggacaggaaaacccctttcctcattcacatactttctcatctacagcacttacctgtgtagatggtttgcatgtggaagataaacagaaagtcagagacagaaatgtaatacctgatactcctccatcaactcctctagtaccatcccgggctagttctgaatgggatatcaagaagttaactaaaaagctcaagggagaattagccaaagagtttgcacctgctacaccaccttctactccacacaactcatctgttggtagtttgtctgagaatgaacaaaatactatagaaaaagaagagttcatgttgaaactcatgcgatctctttctgaagaagttgagagtagtgaaagtggagagctcccagaagtggatgtgaagtcggagcactcagggaagaaggttcagtttgcagaagcattagctacacacatcctttctcttgcaactgaaatggcagcttcccatttagataacaaaataattcaagaacccaaggttaaaaacccttgcttaaatgtgcaaagtcaaagaagtgtgtcgcctacttttttaaacccctcagacgaaaatttgaaaacattatgcaattttgcgggtgatctggcagcagaagtcattacagaagctgagaaaatagcaaaagtccgaaattgtatgcttttcaagcaaaagaagaacagttgttatgctgatggtgacgaagattataaagtagaagagaagttggatatagaggctgtagtgcacccaagagaagtggatccgtttattctttcattaccaccaagttcttgtatgtcaggtctgatgtataagtatcccagctgtgaaagtgtgacagatgaatatgcaggtcaccttattcagatactaaaacaggaaggtggtaatagtgagttgataatggatcagtatgccaataggcttgcctaccgatctgttaaatcaggattacaggaagcagctaagacaaccaaagtgcagtgcaactcaagaatgttccctgtgccaagttcacaagtgaaaacaaacaaggaactgttaatgttttcaaacaaagagcaccaccaagaagcagacaaaaagagacaaagtaaaagaaatgaaggttacttttgtaaaaatcaaacttgtgaaaggaccctggatccatatagaaatgaggtctcccaactgtatagtttttcaacctctctggttcacagcataacaaaagatgctaaggaagagttgacagcctctctagttggcctaccaaaatccttaacagattcttgcttgtttgaaaaatctggatatgaagaagataatgagtgtcacgttacaccagaattgcctaagtctcttcagccttcctcacaaaatcacaggttttaccacagcactggcagtttaaatggatatggttgtggagacaatgttgttcaagctgtagaacagtatgccaaaaaagtagtggatgacactctagagctaactctaggatctacagtgttccgagtgtctgagaccacaaaatcagcagacagggtcacttatgcagaaaagttgtcacctcttacaggtcaagcttgcagatactgtgaccttaaagaactccacaattgcactggaaattcatctcagcactttttcagacagggttctctcgccagtagtaagccagcttctaatccaaaatttagcagccgctatcagaaatctaggatttttcatctcagtgtccctcagattcatgttaatcttgataagaaggcagtgcttgctgagaagatagttgctgaagccattgaaaaagctgagcgagagctgagcagtaccagcctggcagccgacagtgggatcggacaggagggtgccagctttgctgaaagccttgccacagaaaccatgacagcagctgtcacaaatgttgggcatgctgttagcagttcaaaagaaatagaagactttcagtcaaccgagtctgtcagtagccagcagatgaacctcagtattggtgatgacagcactggtagctggtccaatttaagttttgaagatgaacaccaagatgaaagcagcagttttcatcatctaagtgaaagtaatggtaacagcagtagctggagcagtcttggtttagaaggagatttgtatgaggacaatttatcctttccaacatcagacagtgatggaccagatgataaagatgaagagcatgaggacgaagtagaaggtttggggcaagatggaaagacactgctaattacgaatattgacatggagccatgcacggtagacccccagctaaggattattcttcagtggctcattgcctctgaggctgaagttgcagaactttattttcatgactctgcaaataaggagtttatgctactttcaaaacaattacaagagaaaggatggaaagtgggagacctcctgcaggctgtgcttcaatactatgaagtgatggaaaaagcttccagtgaggagagatgcaagtcgctgtttgattggctcttggaaaatgcatag

SEQ ID NO: 8 - DNA, 1095 bp, Homo sapiens
atgcctcactcgtacccagccctttctgctgagcagaagaaggagttgtctgacattgccctgcggattgtagccccgggcaaaggcattctggctgcggatgagtctgtaggcagcatggccaagcggctgagccaaattggggtggaaaacacagaggagaaccgccggctgtaccgccaggtcctgttcagtgctgatgaccgtgtgaaaaagtgcattggaggcgtcattttcttccatgagaccctctaccagaaagatgataatggtgttcccttcgtccgaaccatccaggataagggcatcgtcgtgggcatcaaggttgacaagggtgtggtgcctctagctgggactgatggagaaaccaccactcaagggctggatgggctctcagaacgctgtgcccaatacaagaaggatggtgctgactttgccaagtggcgctgtgtgctgaaaatcagtgagcgtacaccctctgcacttgccattctggagaacgccaacgtgctggcccgttatgccagtatctgccagcagaatggcattgtgcctattgtggaacctgaaatattgcctgatggagaccacgacctcaaacgttgtcagtatgttacagagaaggtcttggctgctgtgtacaaggccctgagtgaccatcatgtatacctggaggggaccctgctcaagcccaacatggtgaccccgggccatgcctgtcccatcaagtataccccagaggagattgccatggcaactgtcactgccctgcgtcgcactgtgcccccagctgtcccaggagtgaccttcctgtctgggggtcagagcgaagaagaggcatcattcaacctcaatgccatcaaccgctgcccccttccccgaccctgggcgcttaccttctcctatgggcgtgccctgcaagcctctgcactcaatgcctggcgagggcaacgggacaatgctggggctgccactgaggagttcatcaagcgggctgaggtgaatgggcttgcagcccagggcaagtatgaaggcagtggagaagatggtggagcagcagcacagtcactctacattgccaaccatgcctactga

SEQ ID NO: 9 - DNA, 3048 bp, Homo sapiens
atgacggtctctcagaaagggggtccccagccaacaccgagcccggctggccctgggacgcaactcggaccaatcacaggagagatggatgaagccgattctgcgtttttaaaatttaagcagacagctgatgactctctgtcccttacatctccaaacaccgagtccatttttgtagaagatccctacaccgcctcgctgaggagtgagattgagtcagacggccacgagtttgaagctgagtcctggagcctcgccgtggatgcagcctacgccaagaagcaaaagagggaggtggtgaaaagacaagatgtcctttatgagctgatgcagacagaggtgcaccacgtgcggacgctcaagatcatgctgaaggtgtactccagggccctgcaggaggagctgcagttcagcagcaaggccattggccgcctcttcccatgcgctgacgacctgctggagacgcacagccacttcctcgctcggctcaaggagcgccgccaggagtccctggaggagggcagtgaccggaattatgtcatccagaaaatcggcgacctcctggttcagcagttttcaggtgaaaatggggagagaatgaaagaaaagtacggtgtgttttgtagtggccacaatgaagctgttagtcattacaagttgctgcttcagcaaaacaagaaatttcaaaacttgatcaagaaaattggcaacttctccatcgtgcggcggcttggcgtgcaggagtgcattctcctggttacacaacgcataaccaaatacccagtgctggtggagcgcatcatccagaacacggaagctggcactgaggactatgaagacctgacccaggccttgaacctcatcaaagatatcatctcacaagtggacgccaaggtcagtgagtgtgagaagggccagcgcctcagggagatcgcagggaagatggacctgaagtcttccagcaaactcaagaacgggctcaccttccgcaaggaagacatgcttcagcggcagctccacctggagggcatgctatgctggaagaccacatcagggcgcttgaaagatatcctggctatcctgctgaccgacgtacttttgctgctacaagaaaaagatcagaaatacgtctttgcttctgtggactcaaagccacccgtcatctcgttacaaaagctcatcgtgagggaagtggccaacgaggagaaagcgatgtttctgatcagcgcctccttgcaagggccggagatgtatgaaatctacacgagctccaaagaggacaggaacgcctggatggcccacatccaaagggctgtggagagctgccctgacgaggaggaggggcccttcagcctgcccgaagaggaaaggaaggtggtcgaggcccgcgccacgagactccgggactttcaagagcggttgagcatgaaagaccagctgatcgcacagagcctcctagagaaacagcagatctacctggagatggccgagatgggcggcctcgaagacctgccccagccccgaggcctattccgtggaggggacccatccgagaccctgcagggggagctaattctcaagtcggccatgagcgagatcgagggcatccagagcctgatctgcaggcagctgggcagcgccaacggccaggcggaagacggaggcagctccacaggcccgcccaggagggctgagaccttcgcgggctacgactgcacaaacagccccaccaagaatggcagtttcaagaagaaagtcagcagcactgaccccaggccccgagactggcgaggccccccaaacagcccggacttgaagctcagtgacagtgacattcctgggagctctgaggaatcgccgcaggtggtggaggcgccaggcacggaatccgatccccgtctgcccaccgtcctggagtcggagcttgtccagcggatccagacactgtcccagctgctcctgaaccttcaggcggtaatcgcccaccaggacagctatgtggagacgcagcgggctgccatccaggagcgggagaagcagttccggctgcagtcgacgcgtgggaacctgctgctggagcaggagcggcaacgcaacttcgagaagcagcgggaggagcgcgcggccctggagaagctgcagagccagctgcggcacgagcagcagcgctgggagcgcgagcgccagtggcagcaccaggagctggagcgtgcgggcgcgcggctgcaggagcgcgagggcgaggcgcggcagctacgcgagcggctggagcaggagcgggccgagctggagcgccagcgccaggcctaccagcacgacctggagcggctgcgcgaggcccagcgtgccgtggagcgcgagcgggagcgcctggagctgctgcgccgcctcaagaagcagaacaccgcgccaggcgcgctgccgcccgacacactggccgaggcccagcccccaagccaccctcccagcttcaacggggaagggctggagggccctcgtgtgagcatgctgccatccggcgtggggccagagtacgcagagcgccccgaggtggctcgccgggacagcgcccccaccgagaaccggctggccaagagcgatgtgcccatccagctgctcagcgccaccaaccagttccagaggcaggcggccgtgcagcagcagatccccaccaagctggcggcctccaccaagggtggcaaggacaagggcggcaagagcaggggctctcagcgctgggagagctcagcgtccttcgacctgaagcagcagctgctgctcaacaagctcatggggaaagatgagagcacctcacggaaccgccgctcgctgagccctatcctgcccggcagacacagtcctgcgcccccaccagaccctggcttccccgccccgagcccaccgccagctgacagcccctccgagggcttctctctcaaggccgggggcacagccctcctgcccgggcccccagctccctcgccactgccggccacaccactcagcgccaaggaggacgccagcaaagaagacgtcatcttcttctaa

SEQ ID NO: 10 - DNA, 1878 bp, Homo sapiens
atggcagaccagagaatggacatttcttcaaccatcagtgatttcatgtccccgggccccaccgacctgctttccagctctcttggtaccagtggtgtggattgcaaccgcaaacggaaaggcagctccactgactaccaagaaagcatggacacagacaaagatgaccctcatggaaggttagaatatacagaacaccaaggaaggataaaaaatgcaagggaagctcacagtcagattgaaaagcggcgtcgggataaaatgaacagttttatagatgaattggcttctttggtaccaacatgcaacgcaatgtccaggaaattagataaacttactgtgctaaggatggctgttcagcacatgaaaacattaagaggtgccaccaatccatacacagaagcaaactacaaaccaacttttctatcagacgatgaattgaaacacctcattctcagggcagcagatggatttttgtttgtcgtaggatgtgaccgagggaagatactctttgtctcagagtctgtcttcaagatcctcaactacagccagaatgatctgattggtcagagtttgtttgactacctgcatcctaaagatattgccaaagtcaaggagcagctctcctcctctgacaccgcaccccgggagcggctcatagatgcaaaaactggacttccagttaaaacagatataacccctgggccatctcgattatgttctggagcacgacgttctttcttctgtaggatgaagtgtaacaggccttcagtaaaggttgaagacaaggacttcccctctacctgctcaaagaaaaaagatcgaaaaagcttctgcacaatccacagcacaggctatttgaaaagctggccacccacaaagatggggctggatgaagacaacgaaccagacaatgaggggtgtaacctcagctgcctcgtcgcaattggacgactgcattctcatgtagttccacaaccagtgaacggggaaatcagggtgaaatctatggaatatgtttctcggcacgcgatagatggaaagtttgtttttgtagaccagagggcaacagctattttggcatatttaccacaagaacttctaggcacatcgtgttatgaatattttcaccaagatgacataggacatcttgcagaatgtcataggcaagttttacagacgagagaaaaaattacaactaattgctataaatttaaaatcaaagatggttcttttatcacactacggagtcgatggttcagtttcatgaacccttggaccaaggaagtagaatatattgtctcaactaacactgttgttttagccaacgtcctggaaggcggggacccaaccttcccacagctcacagcatccccccacagcatggacagcatgctgccctctggagaaggtggcccaaagaggacccaccccactgttccagggattccagggggaacccgggctggggcaggaaaaataggccgaatgattgctgaggaaatcatggaaatccacaggataagagggtcatcgccttctagctgtggctccagcccattgaacatcacgagtacgcctccccctgatgcctcttctccaggaggcaagaagattttaaatggagggactccagacattccttccagtggcctactatcaggccaggctcaggagaacccaggttatccatattctgatagttcttctattcttggtgagaacccccacataggtatagacatgattgacaacgaccaaggatcaagtagtcccagtaatgatgaggcagcaatggctgtcatcatgagcctcttggaagcagatgctggactgggtggccctgttgactttagtgacttgccatggccgctgtaa

SEQ ID NO: 11 - DNA, 1602 bp, Homo sapiens
atgggtccgcgcggcgcggcgagcttgccccgaggccccggacctcggcggctgctcctccccgtcgtcctcccgctgctgctgctgctgttgttggcgccgccgggctcgggcgccggggccagccggccgccccacctggtcttcttgctggcagacgacctaggctggaacgacgtcggcttccacggctcccgcatccgcacgccgcacctggacgcgctggcggccggcggggtgctcctggacaactactacacgcagccgctgtgcacgccgtcgcggagccagctgctcactggccgctaccagatccgtacaggtttacagcaccaaataatctggccctgtcagcccagctgtgttcctctggatgaaaaactcctgccccagctcctaaaagaagcaggttatactacccatatggtcggaaaatggcacctgggaatgtaccggaaagaatgccttccaacccgccgaggatttgatacctactttggatatctcctgggtagtgaagattattattcccatgaacgctgtacattaattgacgctctgaatgtcacacgatgtgctcttgattttcgagatggcgaagaagttgcaacaggatataaaaatatgtattcaacaaacatattcaccaaaagggctatagccctcataactaaccatccaccagagaagcctctgtttctctaccttgctctccagtctgtgcatgagccccttcaggtccctgaggaatacttgaagccatatgactttatccaagacaagaacaggcatcactatgcaggaatggtgtcccttatggatgaagcagtaggaaatgtcactgcagctttaaaaagcagtgggctctggaacaacacggtgttcatcttttctacagataacggagggcagactttggcagggggtaataactggccccttcgaggaagaaaatggagcctgtgggaaggaggcgtccgaggggtgggctttgtggcaagccccttgctgaagcagaagggcgtgaagaaccgggagctcatccacatctctgactggctgccaacactcgtgaagctggccaggggacacaccaatggcacaaagcctctggatggcttcgacgtgtggaaaaccatcagtgaaggaagcccatcccccagaattgagctgctgcataatattgacccgaacttcgtggactcttcaccgtgtcccaggaacagcatggctccagcaaaggatgactcttctcttccagaatattcagcctttaacacatctgtccatgctgcaattagacatggaaattggaaactcctcacgggctacccaggctgtggttactggttccctccaccgtctcaatacaatgtttctgagataccctcatcagacccaccaaccaagaccctctggctctttgatattgatcgggaccctgaagaaagacatgacctgtccagagaatatcctcacatcgtcacaaagctcctgtcccgcctacagttctaccataaacactcagtccccgtgtacttccctgcacaggacccccgctgtgatcccaaggccactggggtgtggggcccttggatgtag

SEQ ID NO: 12 - DNA, 3618 bp, Homo sapiens
atgacgaacccatcagaccgtgtcttgcctgccaactcgatggccgagagccgtgaaggggactttggctgcacagtaatggaactgaggaagctcatggagctgcgttcaagggatgcactgacccagattaatgtccactatggaggtgtacagaatctctgcagtagactgaaaacctcccctgtggaaggtctgtctgggaaccctgcagatctggagaaacgtaggcaggtgtttggacacaacgtgatcccccccaaaaagcccaagactttcttagaattagtgtgggaagctcttcaagatgtcacgcttatcatcctggagattgcagccatcatctccctggtcctgtccttttatcgccctgctggtgaagaaaatgaactgtgtggtcaagtcgcaactaccccagaagatgaaaatgaggcacaagctggctggattgagggggcagccatccttttctcagtgatcatcgtggtgttagtgactgcctttaatgattggagcaaagagaagcaattccgggggctgcagtgccgcattgaacaggagcaaaagttctccatcatccgaaacggtcaactcatccagctccctgtggctgagattgtggttggtgatattgcccaagtcaaatacggtgatctgctgcctgcagatggaatcctgatccaagggaatgatctgaagattgatgagagctctctgacaggggaatctgaccatgtcaagaagtccctggacaaagaccccatgttgctctcagggacccatgtcatggaaggttctggccggatggtggtgacagctgttggtgtcaactctcagactggaatcatccttactctcttgggggtcaatgaggatgacgaaggggagaaaaagaagaaaggtaaaaaacaaggagtccctgaaaatcgcaacaaagcaaagacccaagacggagtggccctggaaatccagccactcaacagccaggagggaatcgacaatgaggaaaaggacaagaaggcagtcaaggtgcctaaaaaggagaagtcagtgctgcagggcaagctgactcgcctggctgttcagattgggaaagccggtctgctcatgtctgctctcacggttttcatcctgattctatactttgtgattgacaactttgtgataaatcgcagaccatggctccctgagtgtactcccatctacatccagtactttgtcaagttcttcatcatcggcatcactgtactggtggtggctgtgccagaggggctgcctctggctgtcaccatctcactggcctactctgtgaagaaaatgatgaaagacaataacctagtacggcacttggatgcttgtgagaccatgggcaacgccaccgccatctgctctgataagacaggcacgttgaccatgaaccgcatgactgtggtacaagcttatattgggggcatccattaccgtcaaatcccaagccctgatgtcttcctgcccaaagtcctggacctcattgtcaatggcatttctatcaacagtgcttatacctccaagattctgcctccagagaaggagggaggcctgcctcggcaggtgggcaacaagaccgagtgtgctctgctaggctttgtcacagatctgaagcaggattatcaggctgtgcgtaatgaagtgcccgaggagaagctctacaaggtgtacacctttaactcagtgcgcaagtcaatgagcaccgtcatcaggaatcccaacggtggcttccgtatgtacagcaagggcgcctctgagatcatcttgcgcaagtgtaatcgaatcctggaccggaaaggggaagcagtgccattcaagaataaagacagagatgatatggtacgcactgtcatcgagcccatggcctgtgatggactccggactatctgcatagcttaccgggacttcgatgacacagagccctcttgggacaatgagaatgagatcctcaccgaactgacctgtatcgcggtggtgggcattgaggaccctgtgcgcccagaggtgccagatgctattgccaaatgcaaacaagctggcattactgtcagaatggtgacaggtgacaacatcaacacagcccgggccattgccaccaaatgtggcattctgacacctggggatgacttcctgtgcttagaaggcaaagaattcaaccggctcatccgcaacgagaaaggcgaggtagagcaagaaaagctggacaagatctggcctaagcttcgggtcctggcgcgatcttctcccactgacaagcacaccctggtgaaaggcataattgacagcactgttggggaacaccggcaggtcgtggctgtcactggtgatggcacaaatgacgggcctgctctgaagaaagcggatgttggttttgccatgggcatcgcaggcacagatgtagcaaaggaggcttcagacatcatcctaacagatgacaacttcaccagcattgtgaaggcagtgatgtggggacgaaatgtctatgacagcatctccaagttcctgcagttccagctcactgtcaatgtggtggccgtgattgtagccttcactggagcctgtatcactcaggattccccattgaaagctgtgcagatgttgtgggttaatctgatcatggacacttttgcttcattggccctggccacagagccccctacggaatctctgttgaagcggcgcccctatggccgaaataagcctctgatctcacgcactatgatgaagaacatcttgggccatgcattctatcagctcattgtcatctttatccttgtctttgcgggtgagaaattctttgatattgatagtgggaggaaggcacctctacattcaccacccagccagcactataccattgtttttaacaccttcgtgctgatgcagctcttcaatgaaatcaactcccgaaagatccatggagagaagaacgtcttttcaggcatctaccgcaacattatcttctgctctgtagtcttgggcacattcatctgccagattttcatcgtggaatttgggggtaaacccttcagttgtacaagcctcagcctgtctcagtggctgtggtgtctcttcattgggattggagaacttctgtggggccagttcatctccgcaatacctacccgatccctgaagttcctgaaggaggctgggcatggcaccaccaaagaggagatcaccaaggatgccgagggactggatgagattgaccatgctgagatggagctgcgccgaggccagatcctctggttccggggcctgaaccgtatccagactcagatcaaagtggtcaaagcgttccatagttccctccacgaaagcattcagaaaccctacaaccaaaagtccatccacagcttcatgacccaccctgaattcgccatagaggaggagttgccacgaacaccactcctggatgaggaagaggaggaaaatcctgacaaggcttctaagtttgggactagggtgctcctgttggatggtgaggtcactccatatgccaatacaaacaacaatgcggtggattgcaaccaagtgcagctcccccagtcggacagctctctacagagcctagagacatcagtttga

SEQ ID NO: 13 - DNA, 2526 bp, Homo sapiens
atgtctgtggatgagaagcctgactcccccatgtatgtgtatgagtccacagtccactgcaccaacatcctcctgggcctcaatgaccagcggaaaaaggatattctctgtgacgtgactttgatcgtggagaggaaggagttccgggcccaccgggctgtgctggccgcatgcagtgaatatttttggcaggcgctggttggacagacaaaaaatgatttggtggtcagcttgcctgaggaggtcacagccaggggctttgggccgctgttacagtttgcctacactgccaagctgttactcagcagagaaaacatccgcgaggtcatccgctgtgctgagttcctgcgcatgcacaacctggaggactcctgcttcagcttcctgcagacccagctcctgaacagtgaggatggcctgtttgtgtgccggaaggatgctgcgtgccagcgcccacacgaggactgcgagaactctgcaggagaggaggaggatgaagaggaggagacgatggattcagagacggccaagatggcttgccccagggaccagatgcttccagagcccatcagctttgaggccgccgccatccccgtagcagagaaggaagaagccctgctgcccgagcctgacgtgcccacagacaccaaggagagctcagaaaaggacgcgttaacgcagtaccccagatacaagaaataccagcttgcatgtaccaagaatgtctataatgcatcatcacacagtacctcaggttttgcaagcacattccgggaagataactctagcaacagcctcaagccggggcttgccagggggcagattaaaagtgagccgcccagtgaagagaatgaggaagagagcatcacgctctgcctgtctggagatgagcctgacgccaaggacagagcgggggatgtcgagatggaccggaaacagcccagccctgcccctacccccacggccccagctggggccgcctgcctggagagatccaggagcgtggcctcgccctcctgcttaaggtctctgttcagcataacgaaaagtgtggagctgtctggcctgcccagtacatctcagcagcactttgccaggagtccagcctgcccttttgacaaggggatcactcagggtgaccttaaaactgactacacccctttcacagggaattatggacagccccacgtgggccagaaggaggtgtccaacttcaccatggggtcgcccctcagggggcctgggttggaggctctctgtaaacaggagggagagctggaccggaggagcgtgatcttctcctccagcgcttgtgaccaagtgagcacctcggtgcattcttattctggggtgagcagtttggacaaagacctctctgagccggtgccaaagggtctgtgggtgggagccggccagtccctccccagctcgcaggcctactcccacggtgggctgatggccgaccacttgccaggaaggatgcggcccaacaccagctgcccggtaccaatcaaagtctgccctcgctcaccccccttggagaccaggaccaggacttccagctcctgctcttcctattcctacgcggaggacgggagcgggggctcaccctgcagcctccctctctgtgagttctcctcctcgccctgttcccagggagccagattccttgccacagaacatcaggaaccaggcctgatgggagatggaatgtacaaccaagtgcggccccaaattaaatgtgagcagtcttatggaaccaactccagtgacgaatccggatcgttctcggaagcagacagtgagtcgtgtcctgtgcaggacaggggccaggaggtaaaacttccttttcctgtagatcaaatcacagatcttccaaggaacgatttccagatgatgattaaaatgcacaagctaacctcagaacagttagagtttattcatgatgtccgacggcgcagcaagaaccgcatcgcggcccagcgctgccgcaaaaggaaactggactgtattcagaatttagaatgtgaaatccgcaaattggtgtgtgagaaagagaaactgttgtcagagaggaatcaactgaaagcatgcatgggggaactgttggacaacttctcctgcctttcccaggaagtttgccgagacatccagagccccgagcagatccaggccctgcatcggtattgccctgtcctcagacccatggacttgcccacggcctccagtattaaccctgcgcccttgggtgctgagcagaacattgcggcctcccaatgcgcagtgggggaaaacgtgccctgctgcttggagccaggcgcggctccccccggacccccctgggcacccagcaacacctccgagaattgtacctctgggaggagactagaaggcactgacccgggaaccttctcagagagaggacctcctcttgaacccaggagccaaacagtgaccgtggacttctgccaggaaatgactgataagtgtacaactgacgaacagcccaggaaagattatacctag

SEQ ID NO: 14 - DNA, 2322 bp, Homo sapiens
atgtctcgccgcaagcaaggcaaaccccagcacttaagcaaacgggaattctcgcccgagcctcttgaagccattcttacagatgatgaaccagaccacggcccgttgggagctccagaaggggatcatgacctcctcacctgtgggcagtgccagatgaacttcccattgggggacattcttatttttatcgagcacaaacggaaacaatgcaatggcagcctctgcttagaaaaagctgtggataagccaccttccccttcaccaatcgagatgaaaaaagcatccaatcccgtggaggttggcatccaggtcacgccagaggatgacgattgtttatcaacgtcatctagaggaatttgccccaaacaggaacacatagcagataaacttctgcactggaggggcctctcctcccctcgttctgcacatggagctctaatccccacgcctgggatgagtgcagaatatgccccgcagggtatttgtaaagatgagcccagcagctacacatgtacaacttgcaaacagccattcaccagtgcatggtttctcttgcaacacgcacagaacactcatggattaagaatctacttagaaagcgaacacggaagtcccctgaccccgcgggttggtatcccttcaggactaggtgcagaatgtccttcccagccacctctccatgggattcatattgcagacaataacccctttaacctgctaagaataccaggatcagtatcgagagaggcttccggcctggcagaagggcgctttccacccactccccccctgtttagtccaccaccgagacatcacttggacccccaccgcatagagcgcctgggggcggaagagatggccctggccacccatcacccgagtgcctttgacagggtgctgcggttgaatccaatggctatggagcctcccgccatggatttctctaggagacttagagagctggcagggaacacgtctagcccaccgctgtccccaggccggcccagccctatgcaaaggttactgcaaccattccagccaggtagcaagccgcccttcctggcgacgccccccctccctcctctgcaatccgcccctcctccctcccagcccccggtcaagtccaagtcatgcgagttctgcggcaagacgttcaaatttcagagcaacctggtggtgcaccggcgcagccacacgggcgagaagccctacaagtgcaacctgtgcgaccacgcgtgcacccaggccagcaagctgaagcgccacatgaagacgcacatgcacaaatcgtcccccatgacggtcaagtccgacgacggtctctccaccgccagctccccggaacccggcaccagcgacttggtgggcagcgccagcagcgcgctcaagtccgtggtggccaagttcaagagcgagaacgaccccaacctgatcccggagaacggggacgaggaggaagaggaggacgacgaggaagaggaagaagaggaggaagaggaggaggaggagctgacggagagcgagagggtggactacggcttcgggctgagcctggaggcggcgcgccaccacgagaacagctcgcggggcgcggtcgtgggcgtgggcgacgagagccgcgccctgcccgacgtcatgcagggcatggtgctcagctccatgcagcacttcagcgaggccttccaccaggtcctgggcgagaagcataagcgcggccacctggccgaggccgagggccacagggacacttgcgacgaagactcggtggccggcgagtcggaccgcatagacgatggcactgttaatggccgcggctgctccccgggcgagtcggcctcggggggcctgtccaaaaagctgctgctgggcagccccagctcgctgagccccttctctaagcgcatcaagctcgagaaggagttcgacctgcccccggccgcgatgcccaacacggagaacgtgtactcgcagtggctcgccggctacgcggcctccaggcagctcaaagatcccttccttagcttcggagactccagacaatcgccttttgcctcctcgtcggagcactcctcggagaacgggagtttgcgcttctccacaccgcccggggagctggacggagggatctcggggcgcagcggcacgggaagtggagggagcacgccccatattagtggtccgggcccgggcaggcccagctcaaaagagggcagacgcagcgacacttgttcttcacacacccccattcggcgtagtacccagagagctcaagatgtgtggcagttttcggatggaagctcgagagcccttaagttctga

SEQ ID NO: 15 - DNA, 780 bp, Homo sapiens
atgggcgacgcggccgcagatccgcccggccccgccctgccctgtgagttcctccggccgggctgcggggctccgctcagtccgggagcgcagctgggccgcggcgctccgacctccgctttcccaccgcccgcagctgaagcacatcccgcagcccggcgcggactccgatcgccgcagttgccctctggcgccatgtcgcagaacggagcgcccgggatgcaggaggagagcctgcagggctcctgggtagaactgcacttcagcaataatgggaacgggggcagcgttccagcctcggtttctatttataatggagacatggaaaaaatactgctggacgcacagcatgagtctggacggagtagctccaagagctctcactgtgacagcccacctcgctcgcagacaccacaagataccaacagagcttctgaaacagatacccatagcattggagagaaaaacagctcacagtctgaggaagatgatattgaaagaaggaaagaagttgaaagcatcttgaagaaaaactcagattggatatgggattggtcaagtcggccggaaaatattccccccaaggagttcctctttaaacacccgaagcgcacggccaccctcagcatgaggaacacgagcgtcatgaagaaagggggcatattctctgcagaatttctgaaagttttccttccatctctgctgctctctcatttgctggccatcggattggggatctatattggaaggcgtctgacaacctccaccagcaccttttga

SEQ ID NO: 16 - DNA, 516 bp, Homo sapiens
atgcatcccttctacacccgggccgccaccatgataggcgagatcgccgccgccgtgtccttcatctccaagtttctccgcaccaaggggctcacgagcgagcgacagctgcagaccttcagccagagcctgcaggagctgctggcagaacattataaacatcactggttcccagaaaagccatgcaagggatcgggttaccgttgtattcgcatcaaccataaaatggatcctctgattggacaggcagcacagcggattggactgagcagtcaggagctgttcaggcttctcccaagtgaactcacactctgggttgacccctatgaagtgtcctacagaattggagaggatggctccatctgtgtgctgtatgaagcctcaccagcaggaggtagcactcaaaacagcaccaacgtgcaaatggtagacagccgaatcagctgtaaggaggaacttctcttgggcagaacgagcccttccaaaaactacaatatgatgactgtatcaggttaa

SEQ ID NO: 17 - DNA, 759 bp, Homo sapiens
atgaagaatgaaattgctgccgttgtcttctttttcacaaggctagttcgaaaacatgataagttgaaaaaagaggcagttgagaggtttgctgagaaattgaccctaatacttcaagaaaaatataaaaatcactggtatccagaaaaaccatcgaaaggacaggcctacagatgtattcgtgtcaataaatttcagagagttgatcctgatgtcctgaaagcctgtgaaaacagctgcatcttgtatagtgacctgggcttgccaaaggagctcactctctgggtggacccatgtgaggtgtgctgtcggtatggagagaaaaacaatgcattcattgttgccagctttgaaaataaagatgagaacaaggatgagatctccaggaaagttaccagggcccttgataaggttacctctgattatcattcaggatcctcttcttcagatgaagaaacaagtaaggaaatggaagtgaaacccagttcggtgactgcagccgcaagtcctgtgtaccagatttcagaacttatatttccacctcttccaatgtggcaccctttgcccagaaaaaagccaggaatgtatcgagggaatggccatcagaatcactatcctcctcctgttccatttggttatccaaatcagggaagaaaaaataaaccatatcgcccaattccagtgacatgggtacctcctcctggaatgcattgtgaccggaatcactggattaatcctcacatgttagcacctcactaa

SEQ ID NO: 18 - DNA, 762 bp, Homo sapiens
atgatgatgaagatcccatggggcagcatcccagtactgatgttgctcctgctcctgggcctaatcgatatctcccaggcccagctcagctgcaccgggcccccagccatccctggcatcccgggtatccctgggacacctggccccgatggccaacctgggaccccagggataaaaggagagaaagggcttccagggctggctggagaccatggtgagttcggagagaagggagacccagggattcctgggaatccaggaaaagtcggccccaagggccccatgggccctaaaggtggcccaggggcccctggagccccaggccccaaaggtgaatcgggagactacaaggccacccagaaaatcgccttctctgccacaagaaccatcaacgtccccctgcgccgggaccagaccatccgcttcgaccacgtgatcaccaacatgaacaacaattatgagccccgcagtggcaagttcacctgcaaggtgcccggtctctactacttcacctaccacgccagctctcgagggaacctgtgcgtgaacctcatgcgtggccgggagcgtgcacagaaggtggtcaccttctgtgactatgcctacaacaccttccaggtcaccaccggtggcatggtcctcaagctggagcagggggagaacgtcttcctgcaggccaccgacaagaactcactactgggcatggagggtgccaacagcatcttttccgggttcctgctctttccagatatggaggcctga

SEQ ID NO: 19 - DNA, 228 bp, Homo sapiens
atggagagaagctttgtatggctgtcatgcttagacagtgattcctgcaacttgaccttcaggctgggagaggtggagagccatgcctgttctccttccttgctatggaatttgctgacacaatatcttccgcctggtgctgggcatatcctaagaacttacaactttcctgtattatcctgtgtgagcagctgtcaccttattgggggaaaaatgcctgaaaattag

SEQ ID NO: 20 - DNA, 1074 bp, Homo sapiens
atggcccgggagaacggcgagagcagctcctcctggaaaaagcaagctgaagacatcaagaagatcttcgagttcaaagagaccctcggaaccggggccttttccgaagtggttttagctgaagagaaggcaactggcaagctctttgctgtgaagtgtatccctaagaaggcgctgaagggcaaggaaagcagcatagagaatgagatagccgtcctgagaaagattaagcatgaaaatattgttgccctggaagacatttatgaaagcccaaatcacctgtacttggtcatgcagctggtgtccggtggagagctgtttgaccggatagtggagaaggggttttatacagagaaggatgccagcactctgatccgccaagtcttggacgccgtgtactatctccacagaatgggcatcgtccacagagacctcaagcccgaaaatctcttgtactacagtcaagatgaggagtccaaaataatgatcagtgactttggattgtcaaaaatggagggcaaaggagatgtgatgtccactgcctgtggaactccaggctatgtcgctcctgaagtcctcgcccagaaaccttacagcaaagccgttgactgctggtccatcggagtgattgcctacatcttgctctgcggctaccctcctttttatgatgaaaatgactccaagctctttgagcagatcctcaaggcggaatatgagtttgactctccctactgggatgacatctccgactctgcaaaagacttcattcggaacctgatggagaaggacccgaataaaagatacacgtgtgagcaggcagctcggcacccatggatcgctggtgacacagccctcaacaaaaacatccacgagtccgtcagcgcccagatccggaaaaactttgccaagagcaaatggagacaagcatttaatgccacggccgtcgtcagacatatgagaaaactacacctcggcagcagcctggacagttcaaatgcaagtgtttcgagcagcctcagtttggccagccaaaaagactgtgcgtatgtagcaaaaccagaatccctcagctga

SEQ ID NO: 21 - DNA, 1134 bp, Homo sapiens
atggcagaaggcaaccacagaaaaaagccacttaaggtgttggaatccctgggcaaagatttcctcactggtgttttggataacttggtggaacaaaatgtactgaactggaaggaagaggaaaaaaagaaatattacgatgctaaaactgaagacaaagttcgggtcatggcagactctatgcaagagaagcaacgtatggcaggacaaatgcttcttcaaaccttttttaacatagaccaaatatcccccaataaaaaagctcatccgaatatggaggctggaccacctgagtcaggagaatctacagatgccctcaagctttgtcctcatgaagaattcctgagactatgtaaagaaagagctgaagagatctatccaataaaggagagaaacaaccgcacacgcctggctctcatcatatgcaatacagagtttgaccatctgcctccgaggaatggagctgactttgacatcacagggatgaaggagctacttgagggtctggactatagtgtagatgtagaagagaatctgacagccagggatatggagtcagcgctgagggcatttgctaccagaccagagcacaagtcctctgacagcacattcttggtactcatgtctcatggcatcctggagggaatctgcggaactgtgcatgatgagaaaaaaccagatgtgctgctttatgacaccatcttccagatattcaacaaccgcaactgcctcagtctgaaggacaaacccaaggtcatcattgtccaggcctgcagaggtgcaaaccgtggggaactgtgggtcagagactctccagcatccttggaagtggcctcttcacagtcatctgagaacctagaggaagatgctgtttacaagacccacgtggagaaggacttcattgctttctgctcttcaacgccacacaacgtgtcctggagagacagcacaatgggctctatcttcatcacacaactcatcacatgcttccagaaatattcttggtgctgccacctagaggaagtatttcggaaggtacagcaatcatttgaaactccaagggccaaagctcaaatgcccaccatagaacgactgtccatgacaagatatttctacctctttcctggcaattga

SEQ ID NO: 22 - DNA, 3501 bp, Homo sapiens
atggatcttggaacagctgagggcacccggtgcacggacccgcctgcaggcaagcccgccatggcgcccaaacgcaagggtggcctgaagctgaacgccatctgcgccaagctgagccgccaggtggtggtggagaagcgagctgacgccggctcccacacggagggcagcccatcgcagccccgggaccaagagcgcagtggccctgagtctggggcagcccgggccccccgcagcgaggaagacaagagacgggcagtgatcgagaagtgggtgaacggggagtacagcgaggagccggcacccacacccgtgttggggcggattgcccgcgagggcctggagctgcctcccgagggtgtctacatggtgcagccccaggggtgcagcgatgaggaagaccacgcggaggagccctccaaggacggcggtgccctggaggagaaggattcggacggggcagcctccaaggaggacagcggccccagcaccaggcaggcttcaggagaggcctcctcgctgcgggactacgcggcctccaccatgaccgagttcctcggcatgtttggctatgatgaccagaacacgcgggacgagctggccaggaagatcagctttgagaagctgcacgcgggctccaccccggaggcagccacctcctccatgctgcccacctccgaggataccctcagcaagcgggcgcggttctctaagtatgaggagtacatccgcaagctcaaggctggcgagcagctctcctggccggcccccagcaccaagaccgaggagcgggtgggcaaggaggtggtgggcaccctgcccggcctgcggctgcccagcagcacggcccacctggagaccaaggccaccatcctgcccctgccgtcgcacagcagtgtccagatgcagaacctggtagcccgggcctccaagtacgacttcttcatccaaaaactgaagaccggcgagaatctgcggccccagaacgggagcacctacaagaagccatccaagtacgacctggagaatgtcaagtacctgcacctcttcaaacccggggagggcagccccgacatgggcggggccatcgccttcaagacaggcaaggtggggcgcccttccaagtacgacgtccggggcatccagaagccaggccccgccaaggttccgcccacccccagcctggctcccgcacccctcgccagcgtgcccagtgcccccagcgcccccgggccagggccagagcctcctgcctccctgtccttcaacactcccgagtacctgaagtcaaccttctccaaaacagactccatcaccacggggaccgtctccactgtcaagaacggactgcccacagataaaccagccgtcactgaagatgtaaacatttaccagaaatatattgccaggttctcgggcagccagcactgtggccacatccactgtgcctaccagtaccgcgagcactaccactgccttgaccctgagtgtaactaccagaggttcacgagtaagcaggacgtgatccgccactacaacatgcacaagaagcgcgacaactccctgcagcacggcttcatgcgtttcagcccgctggacgactgcagcgtctactaccacggctgccacctcaatgggaagagcacccactatcactgcatgcaggtgggctgtaacaaggtgtacacgagcacgtctgacgtgatgacccacgagaacttccacaagaagaatacccagctcattaacgacggcttccagcgcttccgagccaccgaagactgtggcacagccgactgccagttctacggacagaagaccacgcacttccactgcaggcgccccggctgcacattcactttcaagaacaagtgtgacatcgagaagcacaagagctaccacatcaaggacgatgcctacgccaaggacggcttcaagaagttctacaagtacgaggagtgcaagtacgagggctgcgtgtacagcaaggctaccaaccacttccactgcatccgcgccggctgcggcttcaccttcacctccaccagccagatgacctctcacaagcgcaagcatgagcgccggcacatccgctcctcgggcgcgctggggctgccgccctcgctgctgggcgccaaggacacggagcacgaggagtccagcaacgacgaccttgttgacttctccgccctgagcagcaagaactccagcctgagcgcctcccctaccagccagcagtcctctgcgtccctggctgccgccactgccgccaccgaggctgggcccagtgccaccaaacctcccaacagcaagatctcggggctgctgccccagggcctgcctggctcaatccccctggccctggccctctccaactcgggcctgcccacccccacgccctacttccccatactggctggccgtgggagcacctccctgcctgtgggcacccccagcctcctgggtgccgtgtcgtctgggtcagcagcctcagccacccctgacacacccacgctggtcgcctcgggagctggagactcagcccccgtggctgccgcctctgtcccggcaccacccgcctccatcatggagaggatctctgcaagcaagggcctcatctcgcccatgatggccaggctggctgcagctgccctcaagccctctgccacctttgacccaggaagcgggcagcaggtcaccccagccaggttccccccggcccaagtgaagccggaacccggtgagagcaccggcgccccaggcccccacgaagcctcccaggaccgcagtctagacctgactgtgaaggagcccagcaacgaatcaaatggccacgcagtcccggcaaattcatctcttttatcctcgcttatgaataagatgtctcagggcaaccctggcctgggcagcctgctgaacatcaaggcggaagcggaggggagccccgctgcggagccctcgcccttcctaggcaaggccgtgaaggcgctggttcaggagaagttggcagagccctggaaggtgtacctgcgcaggtttggtacaaaggacttctgtgacggccagtgtgacttcctccacaaggcccacttccactgcgtggtggaggaatgcggcgcgctcttcagcaccttggacggggccatcaagcacgcaaacttccacttccggacagagggaggagcagcaaaaggaaacacagaggctgcctttccggcctcggccgccgagaccaaacctcccatggccccctcgtcccctccggtccctcctgtcaccacggccacggtgtcctctctggaggggcccgctcccagcccggcctccgtgccctccacccccaccctgctcgcctggaagcagctggcttccaccataccccagatgcctcagatcccagcgtcagtgcctcacctgcccgcctcgcccttggcaacgacttctctagagaacgccaagccccaggtcaaacccggattcctccagttccaggagaagtga

SEQ ID NO: 23 - DNA, 276 bp, Homo sapiens
atgaaggtctccgcggcagccctcgctgtcatcctcattgctactgccctctgcgctcctgcatctgcctccccatattcctcggacaccacaccctgctgctttgcctacattgcccgcccactgccccgtgcccacatcaaggagtatttctacaccagtggcaagtgctccaacccagcagtcgtctttgtcacccgaaagaaccgccaagtgtgtgccaacccagagaagaaatgggttcgggagtacatcaactctttggagatgagctag

SEQ ID NO: 24 - DNA, 1137 bp, Homo sapiens
atggacctggggaaaccaatgaaaagcgtgctggtggtggctctccttgtcattttccaggtatgcctgtgtcaagatgaggtcacggacgattacatcggagacaacaccacagtggactacactttgttcgagtctttgtgctccaagaaggacgtgcggaactttaaagcctggttcctccctatcatgtactccatcatttgtttcgtgggcctactgggcaatgggctggtcgtgttgacctatatctatttcaagaggctcaagaccatgaccgatacctacctgctcaacctggcggtggcagacatcctcttcctcctgacccttcccttctgggcctacagcgcggccaagtcctgggtcttcggtgtccacttttgcaagctcatctttgccatctacaagatgagcttcttcagtggcatgctcctacttctttgcatcagcattgaccgctacgtggccatcgtccaggctgtctcagctcaccgccaccgtgcccgcgtccttctcatcagcaagctgtcctgtgtgggcatctggatactagccacagtgctctccatcccagagctcctgtacagtgacctccagaggagcagcagtgagcaagcgatgcgatgctctctcatcacagagcatgtggaggcctttatcaccatccaggtggcccagatggtgatcggctttctggtccccctgctggccatgagcttctgttaccttgtcatcatccgcaccctgctccaggcacgcaactttgagcgcaacaaggccatcaaggtgatcatcgctgtggtcgtggtcttcatagtcttccagctgccctacaatggggtggtcctggcccagacggtggccaacttcaacatcaccagtagcacctgtgagctcagtaagcaactcaacatcgcctacgacgtcacctacagcctggcctgcgtccgctgctgcgtcaaccctttcttgtacgccttcatcggcgtcaagttccgcaacgatctcttcaagctcttcaaggacctgggctgcctcagccaggagcagctccggcagtggtcttcctgtcggcacatccggcgctcctccatgagtgtggaggccgagaccaccaccaccttctccccatag

SEQ ID NO: 25 - DNA, 900 bp, Homo sapiens
atgtggctgccttgggctctgttgcttctctgggtcccaggatgttttgctctgagcaaatgcaggaccgtggcgggccccgtggggggatccctgagtgtgcagtgtccctatgagaaggaacacaggaccctcaacaaatactggtgcagaccaccacagattttcctatgtgacaagattgtggagaccaaagggtcagcaggaaaaaggaacggccgagtgtccatcagggacagtcctgcaaacctcagcttcacagtgaccctggagaatctcacagaggaggatgcaggcacctactggtgtggggtggatacaccatggctccgagactttcatgatcccgttgtcgaggttgaggtgtccgtgttcccggcatcaacgtcaatgacacctgcaagtatcactgcggccaagacctcaacaatcacaactgcatttccacctgtatcatccactaccctgtttgcagtgggtgccacccacagtgccagcatccaggaggaaactgaggaggtggtgaactcacagctcccgctgctcctctccctgctggcattgttgctgcttctgttggtgggggcctccctgctagcctggaggatgtttcagaaatggatcaaagctggtgaccattcagagctgtcccagaaccccaagcaggctgccacgcagagtgagctgcactacgcaaatctggagctgctgatgtggcctctgcaggaaaagccagcaccaccaagggaggtggaggtggaatacagcactgtggcctcccccagggaagaacttcactatgcctcggtggtgtttgattctaacaccaacaggatagctgctcagaggcctcgggaggaggaaccagattcagattacagtgtgataaggaagacatag

SEQ ID NO: 26 - DNA, 846 bp, Homo sapiens
atgtcagcccaggagagctgcctcagcctcatcaagtacttcctcttcgttttcaacctcttcttcttcgtcctcggcagcctgatcttctgcttcggcatctggatcctcattgacaagaccagcttcgtgtcctttgtgggcttggccttcgtgcctctgcagatctggtccaaagtcctggccatctcaggaatcttcaccatgggcatcgccctcctgggttgtgtgggggccctcaaggagctccgctgcctcctgggcctgtattttgggatgctgctgctcctgtttgccacacagatcaccctgggaatcctcatctccactcagcgggcccagctggagcgaagcttgcgggacgtcgtagagaaaaccatccaaaagtacggcaccaaccccgaggagaccgcggccgaggagagctgggactatgtgcagttccagctgcgctgctgcggctggcactacccgcaggactggttccaagtcctcatcctgagaggtaacgggtcggaggcgcaccgcgtgccctgctcctgctacaacttgtcggcgaccaacgactccacaatcctagataaggtgatcttgccccagctcagcaggcttggacacctggcgcggtccagacacagtgcagacatctgcgctgtccctgcagagagccacatctaccgcgagggctgcgcgcagggcctccagaagtggctgcacaacaaccttatttccatagtgggcatttgcctgggcgtcggcctactcgagctcgggttcatgacgctctcgatattcctgtgcagaaacctggaccacgtctacaaccggctcgctcgataccgttag

SEQ ID NO: 27 - DNA, 681 bp, Homo sapiens
atgcctgggggtccaggagtcctccaagctctgcctgccaccatcttcctcctcttcctgctgtctgctgtctacctgggccctgggtgccaggccctgtggatgcacaaggtcccagcatcattgatggtgagcctgggggaagacgcccacttccaatgcccgcacaatagcagcaacaacgccaacgtcacctggtggcgcgtcctccatggcaactacacgtggccccctgagttcttgggcccgggcgaggaccccaatggtacgctgatcatccagaatgtgaacaagagccatgggggcatatacgtgtgccgggtccaggagggcaacgagtcataccagcagtcctgcggcacctacctccgcgtgcgccagccgccccccaggcccttcctggacatgggggagggcaccaagaaccgaatcatcacagccgaggggatcatcctcctgttctgcgcggtggtgcctgggacgctgctgctgttcaggaaacgatggcagaacgagaagctcgggttggatgccggggatgaatatgaagatgaaaacctttatgaaggcctgaacctggacgactgctccatgtatgaggacatctcccggggcctccagggcacctaccaggatgtgggcagcctcaacataggagatgtccagctggagaagccgtga

SEQ ID NO: 28 - DNA, 690 bp, Homo sapiens
atggccaggctggcgttgtctcctgtgcccagccactggatggtggcgttgctgctgctgctctcagctgagccagtaccagcagccagatcggaggaccggtaccggaatcccaaaggtagtgcttgttcgcggatctggcagagcccacgtttcatagccaggaaacggggcttcacggtgaaaatgcactgctacatgaacagcgcctccggcaatgtgagctggctctggaagcaggagatggacgagaatccccagcagctgaagctggaaaagggccgcatggaagagtcccagaacgaatctctcgccaccctcaccatccaaggcatccggtttgaggacaatggcatctacttctgtcagcagaagtgcaacaacacctcggaggtctaccagggctgcggcacagagctgcgagtcatgggattcagcaccttggcacagctgaagcagaggaacacgctgaaggatggtatcatcatgatccagacgctgctgatcatcctcttcatcatcgtgcctatcttcctgctgctggacaaggatgacagcaaggctggcatggaggaagatcacacctacgagggcctggacattgaccagacagccacctatgaggacatagtgacgctgcggacaggggaagtgaagtggtctgtaggtgagcacccaggccaggagtga

SEQ ID NO: 29 - DNA, 708 bp, Homo sapiens
atggccttaccagtgaccgccttgctcctgccgctggccttgctgctccacgccgccaggccgagccagttccgggtgtcgccgctggatcggacctggaacctgggcgagacagtggagctgaagtgccaggtgctgctgtccaacccgacgtcgggctgctcgtggctcttccagccgcgcggcgccgccgccagtcccaccttcctcctatacctctcccaaaacaagcccaaggcggccgaggggctggacacccagcggttctcgggcaagaggttgggggacaccttcgtcctcaccctgagcgacttccgccgagagaacgagggctactatttctgctcggccctgagcaactccatcatgtacttcagccacttcgtgccggtcttcctgccagcgaagcccaccacgacgccagcgccgcgaccaccaacaccggcgcccaccatcgcgtcgcagcccctgtccctgcgcccagaggcgtgccggccagcggcggggggcgcagtgcacacgagggggctggacttcgcctgtgatatctacatctgggcgcccttggccgggacttgtggggtccttctcctgtcactggttatcaccctttactgcaaccacaggaaccgaagacgtgtttgcaaatgtccccggcctgtggtcaaatcgggagacaagcccagcctttcggcgagatacgtctaa

SEQ ID NO: 30 - DNA, 1959 bp, Homo sapiens
atggccacctccatgggcctgctgctgctgctgctgctgctcctgacccagcccggggcggggacgggagctgacacggaggcggtggtctgcgtggggaccgcctgctacacggcccactcgggcaagctgagcgctgccgaggcccagaaccactgcaaccagaacgggggcaacctggccactgtgaagagcaaggaggaggcccagcacgtccagcgagtactggcccagctcctgaggcgggaggcagccctgacggcgaggatgagcaagttctggattgggctccagcgagagaagggcaagtgcctggaccctagtctgccgctgaagggcttcagctgggtgggcgggggggaggacacgccttactctaactggcacaaggagctccggaactcgtgcatctccaagcgctgtgtgtctctgctgctggacctgtcccagccgctccttcccagccgcctccccaagtggtctgagggcccctgtgggagcccaggctcccccggaagtaacattgagggcttcgtgtgcaagttcagcttcaaaggcatgtgccggcctctggccctggggggcccaggtcaggtgacctacaccacccccttccagaccaccagttcctccttggaggctgtgccctttgcctctgcggccaatgtagcctgtggggaaggtgacaaggacgagactcagagtcattatttcctgtgcaaggagaaggcccccgatgtgttcgactggggcagctcgggccccctctgtgtcagccccaagtatggctgcaacttcaacaatgggggctgccaccaggactgctttgaagggggggatggctccttcctctgcggctgccgaccaggattccggctgctggatgacctggtgacctgtgcctctcgaaacccttgcagctccagcccatgtcgtgggggggccacgtgcgtcctgggaccccatgggaaaaactacacgtgccgctgcccccaagggtaccagctggactcgagtcagctggactgtgtggacgtggatgaatgccaggactccccctgtgcccaggagtgtgtcaacacccctgggggcttccgctgcgaatgctgggttggctatgagccgggcggtcctggagagggggcctgtcaggatgtggatgagtgtgctctgggtcgctcgccttgcgcccagggctgcaccaacacagatggctcatttcactgctcctgtgaggagggctacgtcctggccggggaggacgggactcagtgccaggacgtggatgagtgtgtgggcccggggggccccctctgcgacagcttgtgcttcaacacacaagggtccttccactgtggctgcctgccaggctgggtgctggccccaaatggggtctcttgcaccatggggcctgtgtctctgggaccaccatctgggccccccgatgaggaggacaaaggagagaaagaagggagcaccgtgccccgtgctgcaacagccagtcccacaaggggccccgagggcacccccaaggctacacccaccacaagtagaccttcgctgtcatctgacgcccccatcacatctgccccactcaagatgctggcccccagtgggtccccaggcgtctggagggagcccagcatccatcacgccacagctgcctctggcccccaggagcctgcaggtggggactcctccgtggccacacaaaacaacgatggcactgacgggcaaaagctgcttttattctacatcctaggcaccgtggtggccatcctactcctgctggccctggctctggggctactggtctatcgcaagcggagagcgaagagggaggagaagaaggagaagaagccccagaatgcggcagacagttactcctgggttccagagcgagctgagagcagggccatggagaaccagtacagtccgacacctgggacagactgctga

SEQ ID NO: 31 - DNA, 1245 bp, Homo sapiens
atgaccaaggcccggctgttccggctgtggctggtgctggggtcggtgttcatgatcctgctgatcatcgtgtactgggacagcgcaggcgccgcgcacttctacttgcacacgtccttctctaggccgcacacggggccgccgctgcccacgcccgggccggacagggacagggagctcacggccgactccgatgtcgacgagtttctggacaagtttctcagtgctggcgtgaagcagagcgaccttcccagaaaggagacggagcagccgcctgcgccggggagcatggaggagagcgtgagaggctacgactggtccccgcgcgacgcccggcgcagcccagaccagggccggcagcaggcggagcggaggagcgtgctgcggggcttctgcgccaactccagcctggccttccccaccaaggagcgcgcattcgacgacatccccaactcggagctgagccacctgatcgtggacgaccggcacggggccatctactgctacgtgcccaaggtggcctgcaccaactggaagcgcgtgatgatcgtgctgagcggaagcctgctgcaccgcggtgcgccctaccgcgacccgctgcgcatcccgcgcgagcacgtgcacaacgccagcgcgcacctgaccttcaacaagttctggcgccgctacgggaagctctcccgccacctcatgaaggtcaagctcaagaagtacaccaagttcctcttcgtgcgcgaccccttcgtgcgcctgatctccgccttccgcagcaagttcgagctggagaacgaggagttctaccgcaagttcgccgtgcccatgctgcggctgtacgccaaccacaccagcctgcccgcctcggcgcgcgaggccttccgcgctggcctcaaggtgtccttcgccaacttcatccagtacctgctggacccgcacacggagaagctggcgcccttcaacgagcactggcggcaggtgtaccgcctctgccacccgtgccagatcgactacgacttcgtggggaagctggagactctggacgaggacgccgcgcagctgctgcagctactccaggtggaccggcagctccgcttccccccgagctaccggaacaggaccgccagcagctgggaggaggactggttcgccaagatccccctggcctggaggcagcagctgtataaactctacgaggccgactttgttctcttcggctaccccaagcccgaaaacctcctccgagactga

SEQ ID NO: 32 - DNA, 4494 bp, Homo sapiens
atggatgtaaccaagaaaaacaaacgagatggaactgaagtcactgagagaattgtcactgaaacagtaaccacaagacttacatccttaccaccaaaaggcgggaccagcaatggctatgctaaaacagcctctcttggtggagggagccggctggagaaacaaagcctgactcatggcagcagcggctacataaactcaactggaagcacacgaggccatgcctccacctctagttacaggagggctcactcacctgcctccactctgcccaactccccaggctcaacctttgaaaggaaaactcacgttacccgccatgcgtatgaagggagctccagtggcaactcttctccggagtaccctcggaaggaatttgcatcttcttcaaccagaggacggagtcaaacacgagagagtgaaattcgagttcgactgcagagtgcgtccccatccacccgatggacagaattggatgatgttaagcgtttgctcaaggggagtcgatcggcaagtgtgagccccacccggaattcctccaacacactccccatccccaagaaaggcactgtggagaccaaaattgtgacagcgagctcccagtcggtgtcaggcacctacgatgcaacgatcctggatgccaaccttccctcccatgtgtggtcctccaccctgcccgcggggtcctccatggggacctatcacaacaacatgacaacccagagctcatccctcctcaacaccaatgcctactctgcgggatcagtcttcggagttccaaacaacatggcgtcctgctcacccactttgcaccctggactcagcacatcctcctcagtgtttggcatgcagaacaatctggcccccagcttgaccaccctgtcccatggcaccaccaccacttccacagcatatggggtgaagaaaaacatgccccagagtcctgcggctgtgaacactggcgtttccacctccgccgcctgcaccacaagtgtgcagagcgatgaccttttgcacaaggactgcaagttcctgatcctagagaaagacaacacacctgccaagaaggagatggagctgctcatcatgaccaaggacagcgggaaggtctttacagcctcccctgccagcatcgctgcaacttctttttcagaagacaccctaaaaaaagaaaagcaagctgcctacaatgctgactcaggcctaaaagccgaagctaatggagacctgaagactgtgtccacaaagggcaagaccaccactgcagatatccacagctacggcagcagtggtggtggtggcagtggaggaggtggcggtgttggtggcgctggcggcggcccttggggaccagcgccagcctggtgcccctgcggctcctgctgcagctggtggaagtggctgctgggcctgctgctcacctggctgctactcctggggctgctcttcggcctcattgctctggcggaggaggtgaggaagctgaaggcgcgtgtggatgagctggagaggatcaggaggagcatactgccctatggggacagcatggatagaatagaaaaggaccgcctccagggcatggcacccgcggcgggagcagacctggacaaaattgggctgcacagtgacagccaggaggagctctggatgttcgtgaggaagaagctaatgatggaacaggaaaatggaaatctccgaggaagccctggccctaaaggtgacatgggaagtccaggccctaaaggagatcgagggttccctgggactccaggtatccctgggcccttgggccacccaggtccacaaggaccaaagggtcaaaaaggcagcgtgggagatcctggcatggaaggccccatgggccagagagggcgagaaggccccatgggacctcgtggtgaggcagggcctcctggatctggagagaaaggggaaagaggggctgctggtgaaccaggtcctcatggcccacctggtgtcccaggttctgtgggtcccaaaggttccagcggctctcctggcccacagggccctccaggtcctgtaggtctccaagggctccgaggtgaagtaggacttcctggtgtcaaaggtgacaaaggaccaatgggaccaccaggacccaaaggtgaccagggtgagaaaggacctcgaggcctcacaggcgagcctggcatgagaggtttgcctggtgctgttggtgagcccggggctaaaggagcaatgggtcctgctggcccagacggacaccaaggcccaagaggtgaacaaggtcttactgggatgcctggaatccgtggcccaccaggaccttctggagacccaggaaagccaggtctcacaggaccccagggacctcagggacttcccggtacccctggccgaccaggaataaaaggtgaaccaggagctccaggcaagatcgtgacttcggaggggtcatcgatgctcactgtcccaggccccccaggacctcctggagccatgggacccccaggacctccaggtgccccaggccctgccggcccagctggtctcccaggacatcaagaagttcttaatttacaaggtcccccaggcccacccggcccacgcgggccaccagggccttccattccaggcccaccaggaccccgaggcccaccaggggagggtttgccaggcccaccaggcccaccaggatcgttcctgtccaactcagaaaccttcctctccggccccccaggcccacctggccccccaggtcccaagggagaccaaggtcccccaggccccagaggacaccaaggcgagcaaggcctcccaggtttctcaacctcagggtccagttctttcggactcaaccttcagggaccaccaggcccacctggcccccagggacccaaaggtgacaaaggtgatccaggtgttccaggggctcttggcattcctagtggtccttctgaagggggatcatcaagtaccatgtacgtgtcaggcccgccagggccccctgggccccctgggcctccgggctctatcagcagctctggccaggagattcagcagtacatctctgagtacatgcagagtgacagtattagatcttacctatccggagttcagggtcccccaggcccacctggtcccccaggacctgtcaccaccatcacaggcgagactttcgactactcagagctggcaagccacgttgtgagctacttacggacttcggggtacggtgtcagcttgttctcgtcctccatctcttctgaagacattctggctgtgctgcagcgggatgacgtgcgtcagtacctacgtcagtacttgatgggccctcggggtccgccagggccaccaggagccagtggagatgggtccctcctgtctttggactatgcagagctgagtagtcgcattctcagctacatgtcgagttctgggatcagcattgggcttcctggtcccccggggccccctggcttgccgggaacctcctatgaggagctcctctccttgctgcgagggtctgaattcagaggcatcgttggacccccaggtcccccgggtccaccagggatcccaggcaatgtgtggtccagcatcagcgtggaggacctctcgtcttacttacatactgccggcttgtcattcatcccaggccctccaggacctcctggtcccccagggcctcgagggcccccgggtgtctcaggagccctggcaacctatgcagctgaaaacagcgacagcttccggagcgagctgatcagctacctcacaagtcctgatgtgcgcagcttcattgttggccccccaggccctcctgggccgcagggaccccctggggacagccgcctcctgtccacggatgcctcccacagtcggggtagcagctcctcctcacacagctcatctgtcaggcggggcagctcctacagctcttccatgagcacaggaggaggtggtgcaggctccctgggtgcaggcggtgcctttggtgaagctgcaggagacaggggtccctatggcactgacatcggcccaggcggaggctatggggcagcagcagaaggcggcatgtatgctggcaatggcggactattgggagctgactttgctggagatctggattacaatgagctggctgtgagggtgtcagagagcatgcagcgtcagggcctactgcaagggatggcctacactgtccagggcccaccaggccagcctgggccacaggggccacccggcatcagcaaggtcttctctgcctacagcaacgtgactgcggacctcatggacttcttccaaacttatggagccattcaaggaccccctgggcaaaaaggagagatgggcactccaggacccaaaggtgacaggggccctgctgggccaccaggtcatcctgggccacctggccctcgaggacacaagggagaaaaaggagacaaaggtgaccaagtctatgctgggcggagaaggagaagaagtattgctgtcaagccgtga

SEQ ID NO: 33 - DNA, 510 bp, Homo sapiens
atgttggctaccagggtatttagcctagttggcaagcgagcaatttccacctctgtgtgtgtacgagctcatgaaagtgttgtgaagagcgaagacttttcgctcccagcttatatggatcggcgtgaccaccccttgccggaggtggcccatgtcaagcacctgtctgccagccagaaggcattgaaggagaaggagaaggcctcctggagcagcctctccatggatgagaaagtcgagttgtatcgcattaagttcaaggagagctttgctgagatgaacaggggctcgaacgagtggaagacggttgtgggcggtgccatgttcttcatcggtttcaccgcgctcgttatcatgtggcagaagcactatgtgtacggccccctcccgcaaagctttgacaaagagtgggtggccaagcagaccaagaggatgctggacatgaaggtgaaccccatccagggcttagcctccaagtgggactacgaaaagaacgagtggaagaagtga

SEQ ID NO: 34 - DNA, 1845 bp, Homo sapiens
atgggcggggtccacgtcgcctaccggggcggagcgggggtggctggagcagtctggacagtcatggcggcgactgtggcgacggcggcagctgtggccccggcgccagcgcccggcacggacagcgcctcttcggtgcactggttccgcaaagggctgcgactccacgacaacccggcgttgctggcggccgtgcgcggggcgcgctgcgtgcgctgcgtttacattctcgacccgtggttcgcggcctcctcctcagtcgggatcaaccgatggaggttcctacttcagtctctggaagatttggacacaagtttaaggaaactgaactcccgcctgtttgtagtccggggacagccagccgacgtgttcccaaggctgttcaaggaatggggagtgacccgcttgacctttgaatatgactctgaaccctttgggaaagaacgggatgcagccatcatgaagatggccaaggaggctggtgtggaagtagtgacggagaattctcataccctctatgacctggacaggatcattgagctgaatgggcagaagccaccccttacatacaagcgctttcaggccatcatcagccgcatggagctgcccaagaagccagtgggcttggtgaccagccagcagatggagagctgcagggccgagatccaggagaaccacgacgagacctacggcgtgccctccctggaggagctggggttccccactgaaggacttggtccagctgtctggcagggaggagagacagaagctctggcccgcctggataagcacttggaacggaaggcctgggttgccaactatgagagaccccgaatgaacgccaactccctcctggccagccccacaggcctcagcccctacctgcgctttggttgtctctcctgccgcctcttctactaccgcctgtgggacctgtataaaaaggtgaagcggaacagcacacctcccctctccctatttgggcaactcctatggcgagagttcttctacacggcagctaccaacaaccccaggtttgaccgcatggaggggaaccccatctgcatccagatcccctgggaccgcaatcctgaggccctggccaagtgggctgagggcaagacaggcttcccttggattgatgccatcatgacccaactgaggcaggagggctggatccaccacctggcccggcatgccgtggcctgcttcctgacccgcggggacctctgggtcagctgggagagcggggtccgggtatttgatgagctgctcctggatgcagatttcagcgtgaacgcaggcagctggatgtggctgtcctgcagtgctttcttccagcagttcttccactgctactgccctgtgggctttggccgtcgcacggaccccagtggggactacatcaggcgatacctgcccaaattgaaagcgttcccctctcgatacatctatgagccctggaatgccccagagtcaattcagaaggcagccaagtgcatcattggtgtggactacccacggcccatcgtcaaccatgccgagaccagccggcttaacattgaacgaatgaagcagatttaccagcagctttcgcgctaccggggactctgtctactggcatctgtcccttcctgtgtggaagacctcagtcaccctgtggcagagcccagctcgagccaggctggcagcatgagcagtgcaggcccaagaccactacccagtggcccagcatcccccaaacgcaagctggaagcagccgaggaaccacctggtgaagaactcagcaaacgggcccgggtggcagagttgccaaccccagagctgccgagcaaggatgcctga

SEQ ID NO: 35 - DNA, 438 bp, Homo sapiens
atgcgagcggctggaactctgctggccttctgctgcctggtcttgagcaccactgggggcccttccccagatacttgttcccaggaccttaactcacgtgtgaagccaggatttcctaaaacaataaagaccaatgacccaggagtcctccaagcagccagatacagtgttgaaaagttcaacaactgcacgaacgacatgttcttgttcaaggagtcccgcatcacaagggccctagttcagatagtgaaaggcctgaaatatatgctggaggtggaaattggcagaactacctgcaagaaaaaccagcacctgcgtctggatgactgtgacttccaaaccaaccacaccttgaagcagactctgagctgctactctgaagtctgggtcgtgccctggctccagcacttcgaggtgcctgttctccgttgtcactga

SEQ ID NO: 36 - DNA, 756 bp, Homo sapiens
atggagggcggggccgcggcagccacccccacagcactgccttactacgtggccttctcccagctgctgggcctgaccttggtggccatgaccggcgcgtggctcgggctgtaccgaggcggcattgcctgggagagcgacctgcagttcaacgcgcaccccctctgcatggtcataggcctgatcttcctgcagggaaatgccctgctggtttaccgtgtcttcaggaacgaagctaaacgcaccaccaaggtcctgcacgggctgctgcacatctttgcgctcgtcatcgccctggttggcttggtggcggtgttcgactaccacaggaagaagggctacgctgacctgtacagcctacacagctggtgcgggatccttgtctttgtcctgtactttgtgcagtggctggtgggcttcagcttcttcctgttccccggagcttcattctccctgcggagccgctaccgcccacagcacatcttctttggtgctaccatcttcctcctttccgtgggcaccgccctgctgggcctgaaggaggcactgctgttcaacctcgggggcaagtatagcgcatttgagcccgagggtgtcctggccaacgtgctgggcctgctgctggcctgcttcggtggggcggtgctctacatcttgacccgggccgactggaagcggccttcccaggcggaagagcaggccctctccatggacttcaagacgctgacggagggagatagccccggctcccagtga

SEQ ID NO: 37 - DNA, 2871 bp, Homo sapiens
atgagttcaggcttatggagccaagaaaaagtcacttcaccctactgggaagagcggattttttacttgcttcttcaagaatgcagcgttacagacaaacaaacacaaaagctccttaaagtaccgaagggaagtataggacagtatattcaagatcgttctgtggggcattcaaggattccttctgcaaaaggcaagaaaaatcagattggattaaaaattctagagcaacctcatgcagttctctttgttgatgaaaaggatgttgtagagataaatgaaaagttcacagagttacttttggcaattaccaattgtgaggagaggttcagcctgtttaaaaacagaaacagactaagtaaaggcctccaaatagacgtgggctgtcctgtgaaagtacagctgagatctggggaagaaaaatttcctggagttgtacgcttcagaggacccctgttagcagagaggacagtctccggaatattctttggagttgaattgctggaagaaggtcgtggtcaaggtttcactgacggggtgtaccaagggaaacagctttttcagtgtgatgaagattgtggcgtgtttgttgcattggacaagctagaactcatagaagatgatgacactgcattggaaagtgattacgcaggtcctggggacacaatgcaggtcgaacttcctcctttggaaataaactccagagtttctttgaaggttggagaaacaatagaatctggaacagttatattctgtgatgttttgccaggaaaagaaagcttaggatattttgttggtgtggacatggataaccctattggcaactgggatggaagatttgatggagtgcagctttgtagttttgcgtgtgttgaaagtacaattctattgcacatcaatgatatcatcccagctttatcagagagtgtgacgcaggaaaggaggcctcccaaacttgcctttatgtcaagaggtgttggggacaaaggttcatccagtcataataaaccaaaggctacaggatctacctcagaccctggaaatagaaacagatctgaattattttataccttaaatgggtcttctgttgactcacaaccacaatccaaatcaaaaaatacatggtacattgatgaagttgcagaagaccctgcaaaatctcttacagagatatctacagactttgaccgttcttcaccaccactccagcctcctcctgtgaactcactgaccaccgagaacagattccactctttaccattcagtctcaccaagatgcccaataccaatggaagtattggccacagtccactttctctgtcagcccagtctgtaatggaagagctaaacactgcacccgtccaagagagtccacccttggccatgcctcctgggaactcacatggtctagaagtgggctcattggctgaagttaaggagaaccctcctttctatggggtaatccgttggatcggtcagccaccaggactgaatgaagtgctcgctggactggaactggaagatgagtgtgcaggctgtacggatggaaccttcagaggcactcggtatttcacctgtgccctgaagaaggcgctgtttgtgaaactgaagagctgcaggcctgactctaggtttgcatcattgcagccggtttccaatcagattgagcgctgtaactctttagcatttggaggctacttaagtgaagtagtagaagaaaatactccaccaaaaatggaaaaagaaggcttggagataatgattgggaagaagaaaggcatccagggtcattacaattcttgttacttagactcaaccttattctgcttatttgcttttagttctgttctggacactgtgttacttagacccaaagaaaagaacgatgtagaatattatagtgaaacccaagagctactgaggacagaaattgttaatcctctgagaatatatggatatgtgtgtgccacaaaaattatgaaactgaggaaaatacttgaaaaggtggaggctgcatcaggatttacctctgaagaaaaagatcctgaggaattcttgaatattctgtttcatcatattttaagggtagaacctttgctaaaaataagatcagcaggtcaaaaggtacaagattgttacttctatcaaatttttatggaaaaaaatgagaaagttggcgttcccacaattcagcagttgttagaatggtcttttatcaacagtaacctgaaatttgcagaggcaccatcatgtctgattattcagatgcctcgatttggaaaagactttaaactatttaaaaaaatttttccttctctggaattaaatataacagatttacttgaagacactcccagacagtgccggatatgtggagggcttgcaatgtatgagtgtagagaatgctacgacgatccggacatctcagctggaaaaatcaagcagttttgtaaaacctgcaacactcaagtccaccttcatccgaagaggctgaatcataaatataacccagtgtcacttcccaaagacttacccgactgggactggagacacggctgcatcccttgccagaatatggagttatttgctgttctctgcatagaaacaagccactatgttgcttttgtgaagtatgggaaggacgattctgcctggctcttctttgacagcatggccgatcgggatggtggtcagaatggcttcaacattcctcaagtcaccccatgcccagaagtaggagagtacttgaagatgtctctggaagacctgcattccttggactccaggagaatccaaggctgtgcacgaagactgctttgtgatgcatatatgtgcatgtaccagagtccaacaatgagtttgtacaaataa

SEQ ID NO: 38 - DNA, 2208 bp, Homo sapiens
atggccaaggagaggggcctaataagccccagtgattttgcccagctgcaaaaatacatggaatactccaccaaaaaggtcagtgatgtcctaaagctcttcgaggatggcgagatggctaaatatgtccaaggagatgccattgggtacgagggattccagcaattcctgaaaatctatctcgaagtggataatgttcccagacacctaagcctggcactgtttcaatcctttgagactggtcactgcttaaatgagacaaatgtgacaaaagatgtggtgtgtctcaatgatgtttcctgctacttttcccttctggagggtggtcggccagaagacaagttagaattcaccttcaagctgtacgacacggacagaaatgggatcctggacagctcagaagtggacaaaattatcctacagatgatgcgagtggctgaatacctggattgggatgtgtctgagctgaggccgattcttcaggagatgatgaaagagattgactatgatggcagtggctctgtctctcaagctgagtgggtccgggctggggccaccaccgtgccactgctagtgctgctgggtctggagatgactctgaaggacgacggacagcacatgtggaggcccaagaggttccccagaccagtctactgcaatctgtgcgagtcaagcattggtcttggcaaacagggactgagctgtaacctctgtaagtacactgttcacgaccagtgtgccatgaaagccctgccttgtgaagtcagcacctatgccaagtctcggaaggacattggtgtccaatcacatgtgtgggtgcgaggaggctgtgagtccgggcgctgcgaccgctgtcagaaaaagatccggatctaccacagtctgaccgggctgcattgtgtatggtgccacctagagatccacgatgactgcctgcaagcggtgggccatgagtgtgactgtgggctgctccgggatcacatcctgcctccatcttccatctatcccagtgtcctggcctctggaccggatcgtaaaaatagcaaaacaagccagaagaccatggatgatttaaatttgagcacctctgaggctctgcggattgaccctgttcctaacacccacccacttctcgtctttgtcaatcctaagagtggcgggaagcaggggcaaagggtgctctggaagttccagtatatattaaaccctcgacaggtgttcaacctcctaaaggatggtcctgagatagggctccgattattcaaggatgttcctgatagccggattttggtgtgtggtggagacggcacagtaggctggattctagagaccattgacaaagctaacttgccagttttgcctcctgttgctgtgttgcccctgggtactggaaatgatctggctcgatgcctaagatggggaggaggttatgaaggacagaatctggcaaagatcctcaaggatttagagatgagtaaagtggtacatatggatcgatggtctgtggaggtgatacctcaacaaactgaagaaaaaagtgacccagtcccctttcaaatcatcaataactacttctctattggcgtggatgcctctattgctcatcgattccacatcatgcgagagaaatatccggagaagttcaacagcagaatgaagaacaagctatggtacttcgaatttgccacatctgaatccatcttctcaacatgcaaaaagctggaggagtctttgacagttgagatctgtgggaaaccgctggatctgagcaacctgtccctagaaggcatcgcagtgctaaacatccctagcatgcatggtggctccaacctctggggtgataccaggagaccccatggggatatctatgggatcaaccaggccttaggtgctacagctaaagtcatcaccgaccctgatatcctgaaaacctgtgtaccagacctaagtgacaagagactggaagtggttgggctggagggtgcaattgagatgggccaaatctataccaagctcaagaatgctggacgtcggctggccaagtgctctgagatcaccttccacaccacaaaaacccttcccatgcaaattgacggagaaccctggatgcagacgccctgtacaatcaagatcacccacaagaaccagatgcccatgctcatgggcccacccccccgctccaccaatttctttggcttcttgagctaa

SEQ ID NO: 39 - DNA, 909 bp, Homo sapiens
atggtgtggaaacggctgggcgcgctggtgatgttccctctacagatgatctatctggtggtgaaagcagccgtcggactggtgctgcccgccaagctgcgggacctgtcgcgggagaacgtcctcatcaccggcggcgggagaggcatcgggcgtcagctcgcccgcgagttcgcggagcgcggcgccagaaagattgttctctggggccggactgagaaatgcctgaaggagacgacggaggagatccggcagatgggcactgagtgccattacttcatctgtgatgtgggcaaccgggaggaggtgtaccagacggccaaggccgtccgggagaaggtgggtgacatcaccatcctggtgaacaatgccgccgtggtccatgggaagagcctaatggacagtgatgatgatgccctcctcaagtcccaacacatcaacaccctgggccagttctggaccaccaaggccttcctgccgcgtatgctggagctgcagaatggccacatcgtgtgcctcaactccgtgctggcactgtctgccatccccggtgccatcgactactgcacatccaaagcgtcagccttcgccttcatggagagcctgaccctggggctgctggactgtccgggagtcagcgccaccacagtgctgcccttccacaccagcaccgagatgttccagggcatgagagtcaggtttcccaacctctttcccccactgaagccggagacggtggcccggaggacagtggaagctgtgcagctcaaccaggccctcctcctcctcccatggacaatgcatgccctcgttatcttgaaaagcatacttccacaggctgcactcgaggagatccacaaattctcaggaacctacacctgcatgaacactttcaaagggcggacatag

SEQ ID NO: 40 - DNA, 1458 bp, Homo sapiens
atgagcggacacagccccacgcgcggggccatgcaggtggccatgaacggtaaggcccgcaaagaggcggtgcagactgcggctaaggaactcctcaagttcgtgaaccggagtccctctcctttccatgctgtggctgaatgccgcaaccgccttctccaggctggcttcagtgaactcaaggagactgagaaatggaatattaagcccgagagcaagtacttcatgaccaggaactcctccaccatcatagcttttgctgtagggggccagtacgttcctggcaatggcttcagcctcatcggggcccacacggacagcccctgcctccgggtgaaacgtcggtctcgccgcagccaggtgggcttccagcaagtcggtgtggagacctatggtggtgggatctggagcacctggtttgaccgtgacctgactctggctggacgcgtcattgtcaagtgccctacctcaggtcggctggagcagcagctggtgcacgtggagcggcccattcttcgcatcccacacctggccatccatctgcagcgaaatatcaacgagaactttgggcccaacacagagatgcatctagtccccattcttgccacagccatccaggaggagctggagaaggggactcctgagccagggcctctcaatgctgtggatgagcggcaccattcggtcctcatgtccctgctctgtgcccatctggggctgagccccaaggacatagtggagatggagctctgccttgcagacacccagcctgcggtcttgggtggtgcctatgatgagttcatctttgctcctcggctggacaatctgcacagctgcttctgtgccctgcaggccttgatagattcctgtgcaggccctggctccctggccacagagcctcacgtgcgcatggtcacactctatgacaacgaagaggtggggtctgagagtgcacagggagcacagtcactgctgacagagctggtgctgcggcggatctcagcctcgtgccagcacccgacagccttcgaggaagccatacccaagtccttcatgatcagcgcagacatggcccatgctgtgcatcccaactacctggacaagcatgaggagaaccaccggcctttattccacaagggccccgtgatcaaggtgaacagcaagcaacgctatgcttcaaacgcggtgtcagaggccctgatccgagaggtggccaacaaagtcaaggtccccctgcaggatctcatggtccggaatgacaccccctgtggaaccaccattggacctatcttggcttctcggctggggctgcgggtgctggatttaggcagcccccaactggccatgcactctatccgggagatggcctgcaccacaggagtcctccagaccctcaccctcttcaagggcttctttgagctgttcccttctctaagccataatctcttagtggattga

SEQ ID NO: 41 - DNA, 1461 bp, Homo sapiens
atgcagccctccggcctcgagggtcccggcacgtttggtcggtggcctctgctgagtctgctgctcctgctgctgctgctccagcctgtaacctgtgcctacaccacgccaggcccccccagagccctcaccacgctgggcgcccccagagcccacaccatgccgggcacctacgctccctcgaccacactcagtagtcccagcacccagggcctgcaagagcaggcacgggccctgatgcgggacttcccgctcgtggacggccacaacgacctgcccctggtcctaaggcaggtttaccagaaagggctacaggatgttaacctgcgcaatttcagctacggccagaccagcctggacaggcttagagatggcctcgtgggcgcccagttctggtcagcctatgtgccatgccagacccaggaccgggatgccctgcgcctcaccctggagcagattgacctcatacgccgcatgtgtgcctcctattctgagctggagcttgtgacctcggctaaagctctgaacgacactcagaaattggcctgcctcatcggtgtagagggtggccactcgctggacaatagcctctccatcttacgtaccttctacatgctgggagtgcgctacctgacgctcacccacacctgcaacacaccctgggcagagagctccgctaagggcgtccactccttctacaacaacatcagcgggctgactgactttggtgagaaggtggtggcagaaatgaaccgcctgggcatgatggtagacttatcccatgtctcagatgctgtggcacggcgggccctggaagtgtcacaggcacctgtgatcttctcccactcggctgcccggggtgtgtgcaacagtgctcggaatgttcctgatgacatcctgcagcttctgaagaagaacggtggcgtcgtgatggtgtctttgtccatgggagtaatacagtgcaacccatcagccaatgtgtccactgtggcagatcacttcgaccacatcaaggctgtcattggatccaagttcatcgggattggtggagattatgatggggccggcaaattccctcaggggctggaagacgtgtccacatacccggtcctgatagaggagttgctgagtcgtggctggagtgaggaagagcttcagggtgtccttcgtggaaacctgctgcgggtcttcagacaagtggaaaaggtacaggaagaaaacaaatggcaaagccccttggaggacaagttcccggatgagcagctgagcagttcctgccactccgacctctcacgtctgcgtcagagacagagtctgacttcaggccaggaactcactgagattcccatacactggacagccaagttaccagccaagtggtcagtctcagagtcctccccccacatggccccagtccttgcagttgtggccaccttcccagtccttattctgtggctctga

SEQ ID NO: 42 - DNA, 1314 bp, Homo sapiens
atggcggctgggaccctgtacacgtatcctgaaaactggagggccttcaaggctctcatcgctgctcagtacagcggggctcaggtccgcgtgctctccgcaccaccccacttccattttggccaaaccaaccgcacccctgaatttctccgcaaatttcctgccggcaaggtcccagcatttgagggtgatgatggattctgtgtgtttgagagcaacgccattgcctactatgtgagcaatgaggagctgcggggaagtactccagaggcagcagcccaggtggtgcagtgggtgagctttgctgattccgatatagtgcccccagccagtacctgggtgttccccaccttgggcatcatgcaccacaacaaacaggccactgagaatgcaaaggaggaagtgaggcgaattctggggctgctggatgcttacttgaagacgaggacttttctggtgggcgaacgagtgacattggctgacatcacagttgtctgcaccctgttgtggctctataagcaggttctagagccttctttccgccaggcctttcccaataccaaccgctggttcctcacctgcattaaccagccccagttccgggctgtcttgggcgaagtgaaactgtgtgagaagatggcccagtttgatgctaaaaagtttgcagagacccaacctaaaaaggacacaccacggaaagagaagggttcacgggaagagaagcagaagccccaggctgagcggaaggaggagaaaaaggcggctgcccctgctcctgaggaggagatggatgaatgtgagcaggcgctggctgctgagcccaaggccaaggaccccttcgctcacctgcccaagagtacctttgtgttggatgaatttaagcgcaagtactccaatgaggacacactctctgtggcactgccatatttctgggagcactttgataaggacggctggtccctgtggtactcagagtatcgcttccctgaagaactcactcagaccttcatgagctgcaatctcatcactggaatgttccagcgactggacaagctgaggaagaatgccttcgccagtgtcatcctttttggaaccaacaatagcagctccatttctggagtctgggtcttccgaggccaggagcttgcctttccgctgagtccagattggcaggtggactacgagtcatacacatggcggaaactggatcctggcagcgaggagacccagacgctggttcgagagtacttttcctgggagggggccttccagcatgtgggcaaagccttcaatcagggcaagatcttcaagtga

SEQ ID NO: 43 - DNA, 1605 bp, Homo sapiens
atgttcagctgggtcagcaaggatgcccgccgcaagaaggagccggagctcttccagacggtggctgaggggctgcggcagctgtacgcgcagaagctgctacccctggaggagcactaccgcttccacgagttccactcgcccgcgctggaggacgctgacttcgacaacaagcctatggtgctcctcgtggggcagtacagcacgggcaagaccaccttcatccgacacctgatcgagcaggacttcccggggatgcgcatcgggcccgagcccaccaccgactccttcatcgccgtcatgcacggccccactgagggcgtggtgccgggcaacgcgctcgtggtggacccgcggcgccccttccgcaagctcaacgcgtttggcaacgctttcctcaacaggttcatgtgtgcccagctgcccaaccccgtcctggacagcatcagcatcatcgacacccccgggatcctgtctggagagaagcagcggatcagcagaggctatgactttgcagccgtcctggagtggttcgcggagcgtgtggaccgcatcatcctgctcttcgacgcccacaagctggacatctccgatgagttctcggaagtgatcaaggctctgaagaaccatgaggacaagatccgcgtggtgctgaacaaggcagaccagatcgagacgcagcagctgatgcgggtgtacggggccctcatgtggtccctgggcaagatcatcaacacccccgaggtggtcagggtctacatcggctccttctggtcccacccgctcctcatccccgacaaccgcaagctctttgaggccgaggagcaggacctcttcaaggacatccagtcactgccccgaaacgccgccctcaggaagctcaatgacctgatcaagcgggcacggctggccaaggttcacgcctacatcatcagctccctcaagaaagagatgcccaatgtctttggtaaagagagcaaaaagaaagagctggtgaacaacctcggagagatctaccagaagattgagcgcgagcaccagatctcccctggggacttcccgagcctccgcaagatgcaggaactcctgcagacccaggacttcagcaagttccaggcgctgaagcccaagctgctggacacggtggatgacatgctggccaacgacatcgcgcggctgatggtgatggtgcggcaggaggagtccctgatgccttcccaggtggtcaagggcggcgcctttgacggcaccatgaacgggccgttcgggcacggctacggcgagggggccggcgagggcatcgacgacgtggagtgggtggtgggcaaggacaagcccacctacgacgagatcttctacacgctgtcccctgtcaacggcaagatcacgggcgccaacgccaagaaggagatggtgaagtccaagctccccaacaccgtgctagggaagatctggaagctggccgacgtggacaaggacgggctgctggacgacgaggagttcgcgctggccaaccacctcatcaaggtcaagctggagggccacgagctgcccgccgacctgcccccgcacctggtgccgccctccaagcgcagacatgagtga

SEQ ID NO: 44 - DNA, 1656 bp, Homo sapiens
atggctggtgatctttcagcaggtttcttcatggaggaacttaatacataccgtcagaagcagggagtagtacttaaatatcaagaactgcctaattcaggacctccacatgataggaggtttacatttcaagttataatagatggaagagaatttccagaaggtgaaggtagatcaaagaaggaagcaaaaaatgccgcagccaaattagctgttgagatacttaataaggaaaagaaggcagttagtcctttattattgacaacaacgaattcttcagaaggattatccatggggaattacataggccttatcaatagaattgcccagaagaaaagactaactgtaaattatgaacagtgtgcatcgggggtgcatgggccagaaggatttcattataaatgcaaaatgggacagaaagaatatagtattggtacaggttctactaaacaggaagcaaaacaattggccgctaaacttgcatatcttcagatattatcagaagaaacctcagtgaaatctgactacctgtcctctggttcttttgctactacgtgtgagtcccaaagcaactctttagtgaccagcacactcgcttctgaatcatcatctgaaggtgacttctcagcagatacatcagagataaattctaacagtgacagtttaaacagttcttcgttgcttatgaatggtctcagaaataatcaaaggaaggcaaaaagatctttggcacccagatttgaccttcctgacatgaaagaaacaaagtatactgtggacaagaggtttggcatggattttaaagaaatagaattaattggctcaggtggatttggccaagttttcaaagcaaaacacagaattgacggaaagacttacgttattaaacgtgttaaatataataacgagaaggcggagcgtgaagtaaaagcattggcaaaacttgatcatgtaaatattgttcactacaatggctgttgggatggatttgattatgatcctgagaccagtgatgattctcttgagagcagtgattatgatcctgagaacagcaaaaatagttcaaggtcaaagactaagtgccttttcatccaaatggaattctgtgataaagggaccttggaacaatggattgaaaaaagaagaggcgagaaactagacaaagttttggctttggaactctttgaacaaataacaaaaggggtggattatatacattcaaaaaaattaattcatagagatcttaagccaagtaatatattcttagtagatacaaaacaagtaaagattggagactttggacttgtaacatctctgaaaaatgatggaaagcgaacaaggagtaagggaactttgcgatacatgagcccagaacagatttcttcgcaagactatggaaaggaagtggacctctacgctttggggctaattcttgctgaacttcttcatgtatgtgacactgcttttgaaacatcaaagtttttcacagacctacgggatggcatcatctcagatatatttgataaaaaagaaaaaactcttctacagaaattactctcaaagaaacctgaggatcgacctaacacatctgaaatactaaggaccttgactgtgtggaagaaaagcccagagaaaaatgaacgacacacatgttag

SEQ ID NO: 45 - DNA, 1419 bp, Homo sapiens
atggcgggcggagaagctggagtgactctagggcagccgcatctttcgcgtcaggatctcaccaccttggatgttaccaagttgacgccactttcacacgaagttatcagcagacaagccacaattaacataggtacaattggtcatgtagctcatgggaaatccacagtcgtcaaagctatttctggagttcatactgtcaggttcaaaaatgaactagaaagaaatattacaatcaagcttggatatgctaatgctaagatttataagcttgatgacccaagttgccctcggccagaatgttatagatcttgtgggagcagtacacctgacgagtttcctacggacattccagggaccaaagggaacttcaaattagtcagacatgtttcctttgttgactgtcctggccacgatattttgatggctactatgctgaacggtgcagcagtgatggatgcagctcttctgttgatagctggtaatgaatcttgccctcagcctcagacatcggaacacctggctgctatagagatcatgaaactgaagcatattttgattctacaaaataaaattgatttggtaaaagaaagtcaggctaaagaacaatacgagcagatccttgcatttgtccaaggtacagtagcagagggagctcccattattccaatttcagctcagctgaaatacaatattgaagttgtttgtgagtacatagtaaagaaaattccagtacccccaagagactttacttcagagccccggcttattgttattagatcttttgatgtcaacaaacctggctgtgaagttgatgaccttaagggaggtgtagctggtggtagtatcctaaaaggagtattaaaggtgggccaggagatagaagtaagacctggtattgtttccaaagatagtgaaggaaaactcatgtgtaaaccaatcttttccaaaattgtatcactttttgcggagcataatgatctgcaatatgctgctccaggcggtcttattggagttggaacaaaaattgaccccactttgtgccgggctgacagaatggtggggcaagtacttggtgcagtcggagctttacctgagatattcacagaattggaaatttcctatttcctgcttagacggcttctaggtgtacgcactgaaggagacaagaaagcagcaaaggttcaaaagctgtctaagaatgaagtgctcatggtgaacataggatccctgtcaacaggagggagagttagtgctgtcaaggccgatttgggtaaaattgttttgaccaatccagtgtgcacagaggtaggagaaaaaattgcccttagccgaagagttgaaaaacactggcgtttaattggttggggtcagataagaagaggagtgacaatcaagccaacagtagatgatgactga

SEQ ID NO: 46 - DNA, 1836 bp, Homo sapiens
atggcggcctcagcaaaaaagaagaataagaaggggaagactatctccctaacagactttctggctgaggatgggggtactggtggaggaagcacctatgtttccaaaccagtcagctgggctgatgaaacggatgacctggaaggagatgtttcgaccacttggcacagtaacgatgacgatgtgtatagggcgcctccaattgaccgttccatccttcccactgctccacgggctgctcgggaacccaatatcgaccggagccgtcttcccaaatcgccaccctacactgcttttctaggaaacctaccctatgatgttacagaagagtcaattaaggaattctttcgaggattaaatatcagtgcagtgcgtttaccacgtgaacccagcaatccagagaggttgaaaggttttggttatgctgaatttgaggacctggattccctgctcagtgccctgagtctcaatgaagagtctctaggtaacaggagaattcgagtggacgttgctgatcaagcacaggataaagacagggatgatcgttcttttggccgtgatagaaatcgggattctgacaaaacagatacagactggagggctcgtcctgctacagacagctttgatgactacccacctagaagaggtgatgatagctttggagacaagtatcgagatcgttatgattcagaccggtatcgggatgggtatcgggatgggtatcgggatggcccacgccgggatatggatcgatatggtggccgggatcgctatgatgaccgaggcagcagagactatgatagaggctatgattcccggataggcagtggcagaagagcatttggcagtgggtatcgcagggatgatgactacagaggaggcggggaccgctatgaagaccgatatgacagacgggatgatcggtcgtggagctccagagatgattactctcgggatgattataggcgtgatgatagaggtcccccccaaagacccaaactgaatctaaagcctcggagtactcctaaggaagatgattcctctgctagtacctcccagtccactcgagctgcttctatctttggaggggcaaagcctgttgacacagctgctagagaaagagaagtagaagaacggctacagaaggaacaagagaagttgcagcgtcagctggatgagccaaaactagaacgacggcctcgggagagacacccaagctggcgaagtgaagaaactcaggaacgggaacggtcgaggacaggaagtgagtcatcacaaactgggacctccaccacatctagcagaaatgcacgaaggagagagagtgagaagtctctagaaaatgaaacactcaataaggaggaagattgccactctccaacttctaaacctcccaaacctgatcagcccctaaaggtaatgccagcccctccaccaaaggagaatgcttgggtgaagcgaagttctaaccctcctgctcgatctcagagctcagacacagagcagcagtcccctacaagtggtgggggaaaagtagctccagctcaaccatctgaggaaggaccaggaaggaaagatgaaaataaagtagatgggatgaatgccccaaaaggccaaactgggaactctagccgtggtccaggcgacggagggaacagagaccactggaaggagtcagataggaaagatggcaaaaaggatcaagactccagatctgcacctgagccaaagaaacctgaggaaaatccagcttccaagttcagttctgcaagcaagtatgctgctctctctgttgatggtgaagatgaaaatgagggagaagattatgccgaatag

SEQ ID NO: 47 - DNA, 1668 bp, Homo sapiens
atgacgctgcgcgcggccgtcttcgaccttgacggggtgctggcgctgccagcggtgttcggcgtcctcggccgcacggaggaggccctggcgctgcccagaggacttctgaatgatgctttccagaaagggggaccagagggtgccactacccggcttatgaaaggagagatcacactttcccagtggataccactcatggaagaaaactgcaggaagtgctccgagaccgctaaagtctgcctccccaagaatttctccataaaagaaatctttgacaaggcgatttcagccagaaagatcaaccgccccatgctccaggcagctctcatgctcaggaagaaaggattcactactgccatcctcaccaacacctggctggacgaccgtgctgagagagatggcctggcccagctgatgtgtgagctgaagatgcactttgacttcctgatagagtcgtgtcaggtgggaatggtcaaacctgaacctcagatctacaagtttctgctggacaccctgaaggccagccccagtgaggtcgtttttttggatgacatcggggctaatctgaagccagcccgtgacttgggaatggtcaccatcctggtccaggacactgacacggccctgaaagaactggagaaagtgaccggaatccagcttctcaataccccggcccctctgccgacctcttgcaatccaagtgacatgagccatgggtacgtgacagtaaagcccagggtccgtctgcattttgtggagctgggctccggccctgctgtgtgcctctgccatggatttcccgagagttggtattcttggaggtaccagatccctgctctggcccaggcaggttaccgggtcctagctatggacatgaaaggctatggagagtcatctgctcctcccgaaatagaagaatattgcatggaagtgttatgtaaggagatggtaaccttcctggataaactgggcctctctcaagcagtgttcattggccatgactggggtggcatgctggtgtggtacatggctctcttctaccccgagagagtgagggcggtggccagtttgaatactcccttcataccagcaaatcccaacatgtcccctttggagagtatcaaagccaacccagtatttgattaccagctctacttccaagaaccaggagtggctgaggctgaactggaacagaacctgagtcggactttcaaaagcctcttcagagcaagcgatgagagtgttttatccatgcataaagtctgtgaagcgggaggactttttgtaaatagcccagaagagcccagcctcagcaggatggtcactgaggaggaaatccagttctatgtgcagcagttcaagaagtctggtttcagaggtcctctaaactggtaccgaaacatggaaaggaactggaagtgggcttgcaaaagcttgggacggaagatcctgattccggccctgatggtcacggcggagaaggacttcgtgctcgttcctcagatgtcccagcacatggaggactggattccccacctgaaaaggggacacattgaggactgtgggcactggacacagatggacaagccaaccgaggtgaatcagatcctcattaagtggctggattctgatgcccggaacccaccggtggtctcaaagatgtag

SEQ ID NO: 48 - DNA, 1326 bp, Homo sapiens
atgaaggcggccgtcgatctcaagccgactctcaccatcatcaagacggaaaaagtcgatctggagcttttcccctccccggatatggaatgtgcagatgtcccactattaactccaagcagcaaagaaatgatgtctcaagcattaaaagctactttcagtggtttcactaaagaacagcaacgactggggatcccaaaagacccccggcagtggacagaaacccatgttcgggactgggtgatgtgggctgtgaatgaattcagcctgaaaggtgtagacttccagaagttctgtatgaatggagcagccctctgcgccctgggtaaagactgctttctcgagctggccccagactttgttggggacatcttatgggaacatctagagatcctgcagaaagaggatgtgaaaccatatcaagttaatggagtcaacccagcctatccagaatcccgctatacctcggattacttcattagctatggtattgagcatgcccagtgtgttccaccatcggagttctcagagcccagcttcatcacagagtcctatcagacgctccatcccatcagctcggaagagctcctctccctcaagtatgagaatgactacccctcggtcattctccgagaccctctccagacagacaccttgcagaatgactactttgctatcaaacaagaagtcgtcaccccagacaacatgtgcatggggaggaccagtcgtggtaaactcgggggccaggactcttttgaaagcatagagagctacgatagttgtgatcgcctcacccagtcctggagcagccagtcatctttcaacagcctgcagcgtgttccctcctatgacagcttcgactcagaggactatccggctgccctgcccaaccacaagcccaagggcaccttcaaggactatgtgcgggaccgtgctgacctcaataaggacaagcctgtcattcctgctgctgccctagctggctacacaggcagtggaccaatccagctatggcagtttcttctggaattactcactgataaatcctgtcagtcttttatcagctggacaggagatggctgggaattcaaactttctgacccagatgaggtggccaggagatggggaaagaggaaaaacaaacctaagatgaattatgagaaactgagccgtggcctacgctactattacgacaaaaacatcatccacaagacagcggggaaacgctacgtgtaccgctttgtgtgtgacctgcagagcctgctggggtacacccctgaggagctgcacgccatgctggacgtcaagccagatgccgacgagtga

SEQ ID NO: 49 - DNA, 2787 bp, Homo sapiens
atgggcggctcagcctccagccagctggacgagggcaagtgcgcttacatccgagggaaaactgaggctgccatcaaaaacttcagtccctactacagtcgtcagtactctgtggctttctgcaatcacgtgcgcactgaagtagaacagcaaagagatttaacgtcacagtttttgaagaccaagccaccattggcgcctggaactattttgtatgaagcagagctatcacaattttctgaagacataaagaagtggaaggagagatacgttgtagttaaaaatgattatgctgtggagagctatgagaataaagaggcctatcagagaggagctgctcctaaatgtcgaattcttccagccggtggcaaggtgttaacctcagaagatgaatataatctgttgtctgacaggcatttcccagaccctcttgcctccagtgagaaggagaacactcagccctttgtggtcctgcccaaggaattcccagtgtacctgtggcagcccttcttcagacacggctacttctgcttccacgaggctgctgaccagaagaggtttagtgccctcctgagtgactgcgtcaggcatctcaatcatgattacatgaagcagatgacatttgaagcccaagcctttttagaagctgtgcaattcttccgacaggagaagggtcactatggttcctgggaaatgatcactggggatgaaatccagatcctgagtaacctggtgatggaggagctcctgcccactcttcagacagacctgctgcctaagatgaaggggaagaagaatgacagaaagaggacgtggcttggtctcctcgaggaggcctacaccctggttcagcatcaagtttcagaaggattaagtgccttgaaggaggaatgcagagctctgacaaagggcctggaaggaacgatccgttctgacatggatcagattgtgaactcaaagaactatttaattggaaagatcaaagcgatggtggcccagccggcggagaaaagctgcttggagagtgtgcagccattcctggcatccatcctggaggagctcatgggaccagtgagctcgggattcagtgaagtacgtgtactctttgagaaagaggtgaatgaagtcagccagaacttccagaccaccaaagacagtgtccagctaaaggagcatctagaccggcttatgaatcttccgctgcattccgtgaagatggaaccttgttatactaaagtcaacctgcttcacgagcgcctgcaggatctcaagagccgcttcagattcccccacattgatctggtggttcagaggacacagaactacatgcaggagctaatggagaatgcagtgttcacttttgagcagttgctttccccacatctccaaggagaggcctccaaaactgcagttgccattgagaaggttaaactccgagtcttaaagcaatatgattatgacagcagcaccatccgaaagaagatatttcaagaggcactagttcaaatcacacttcccactgtgcagaaggcactggcgtccacatgcaaaccagagcttcagaaatacgagcagttcatctttgcagatcataccaatatgattcacgttgaaaatgtctatgaggagattttacatcagatcctgcttgatgaaactctgaaagtgataaaggaagctgctatcttgaagaaacacaacttatttgaagataacatggccttgcccagtgaaagtgtgtccagcttaacagatctaaagccccccacagggtcaaaccaggccagccctgccaggagagcttctgccattctgccaggagttctgggtagtgagaccctcagtaacgaagtattccaggagtcagaggaagagaagcagcctgaggtccctagctcgttggccaaaggagaaagcctttctctccctgggccaagcccacccccagatgggactgagcaggtgattatttcaagagtggatgaccccgtggtgaatcctgtggcaacagaggacacagcaggactcccgggcacatgctcatcagagctggagtttggagggacccttgaggatgaagaacccgcccaggaagagccagaacccatcactgcctcgggttctttgaaggcgctcagaaagttgctgacagcgtccgtggaagtaccagtggactctgctccagtgatggaagaagatacgaatggggagagccacgttccccaagaaaatgaagaagaagaggaaaaagagcccagtcaggcagctgccatccaccccgacaactgtgaagaaagtgaagtcagcgagagggaggcccaacctccctgtcccgaggcccatggggaggagttggggggatttccagaggtaggcagcccagcctctccgccagccagtggagggctcaccgaggagcccctggggcccatggagggggagctcccaggagaggcctgcacactcactgcccatgaaggaagagggggcaagtgtaccgaggaaggggatgcctcacagcaagagggctgcaccttaggttctgaccccatctgcctcagtgagagccaggtttctgaggaacaagaagagatgggagggcaaagcagcgcggcccaggccacggccagtgtgaatgcagaggagatcaaggtagcccgtattcatgagtgtcagtgggtggtggaggatgctccaaacccggatgtcctgctgtcacacaaagatgacgtgaaggagggagaaggtggtcaggagagtttcccagagctgccctcagaggagtga

SEQ ID NO: 50 - DNA, 1254 bp, Homo sapiens
atggagttcgtgaaatgccttggccaccccgaagagttctacaacctggtgcgcttccggatcgggggcaagcggaaggtgatgcccaagatggaccaggactcgctcagcagcagcctgaaaacttgctacaagtatctcaatcagaccagtcgcagtttcgcagctgttatccaggcgctggatggggaaatgcgcaacgcagtgtgcatattttatctggttctccgagctctggacacactggaagatgacatgaccatcagtgtggaaaagaaggtcccgctgttacacaactttcactctttcctttaccaaccagactggcggttcatggagagcaaggagaaggatcgccaggtgctggaggacttcccaacgatctcccttgagtttagaaatctggctgagaaataccaaacagtgattgccgacatttgccggagaatgggcattgggatggcagagtttttggataagcatgtgacctctgaacaggagtgggacaagtactgccactatgttgctgggctggtcggaattggcctttcccgtcttttctcagcctcagagtttgaagaccccttagttggtgaagatacagaacgtgccaactctatgggcctgtttttgcagaaaacaaacatcatccgtgactatctggaagaccagcaaggaggaagagagttctggcctcaagaggtttggagcaggtatgttaagaagttaggggattttgctaagccggagaatattgacttggccgtgcagtgcctgaatgaacttataaccaatgcactgcaccacatcccagatgtcatcacctacctttcgagactcagaaaccagagtgtgtttaacttctgtgctattccacaggtgatggccattgccactttggctgcctgttataataaccagcaggtgttcaaaggggcagtgaagattcggaaagggcaagcagtgaccctgatgatggatgccaccaatatgccagctgtcaaagccatcatatatcagtatatggaagagatttatcatagaatccccgactcagacccatcttctagcaaaacaaggcagatcatctccaccatccggacgcagaatcttcccaactgtcagctgatttcccgaagccactactcccccatctacctgtcgtttgtcatgcttttggctgccctgagctggcagtacctgaccactctctcccaggtaacagaagactatgttcagactggagaacactga

SEQ ID NO: 51 - DNA, 7809 bp, Homo sapiens
atgccggtaaccgagaaggatctagctgaggacgcgccttggaagaagatccagcagaacacgttcacacgctggtgcaacgagcacctcaagtgcgtgaacaaacgcatcggcaacctgcagaccgacctgagcgacgggctgcggctcatcgcgctgctcgaggtgctcagccagaagcgcatgtaccgcaagtaccatcagcggcccacctttcgccagatgcagctcgagaatgtgtccgtggcgctcgagttcctggaccgtgagagcatcaagctcgtgtccatcgatagcaaagccattgtggatgggaacctgaagctcatcttgggtctggtgtggacgctgatcctccactactccatctccatgcccgtgtgggaggatgaaggggatgatgatgccaagaagcagacgccaaagcagaggctgctggggtggattcagaacaagatcccctacttgcccatcaccaactttaaccagaactggcaagacggcaaagccctgggagccctggtagacagctgtgctccaggtctgtgcccagactgggaatcctgggacccgcagaagcctgtggataatgcacgagaagccatgcagcaggcagatgactggctgggtgtcccacaggtcatcactcctgaagaaatcattcacccggatgtggacgagcactcagttatgacttacctgtcccagttccccaaagccaagctcaagccgggggctcctctcaaacccaaactcaacccgaagaaagccagggcctatggcagaggaatcgagcccactggaaacatggtgaagcagccagccaagttcactgtggacaccatcagcgccgggcaaggagacgtgatggtgtttgttgaggacccagaagggaacaaagaggaggcacaagtgacccctgacagtgacaagaacaagacatactctgtggagtatctgcccaaggtcaccgggctacacaaagtcacagtcctctttgcaggacagcacatctccaagagcccatttgaagtgagtgttgacaaggcccagggagatgccagtaaagtcactgcaaaaggtccagggttggaagctgtagggaacatcgccaataagcccacctactttgacatctatacggcaggagctggtgtgggtgacattggtgtggaggtggaagatccccaggggaagaacaccgtggagttgctcgtggaagacaaaggaaaccaggtgtatcgatgtgtgtacaaacccatgcagcctggccctcacgtggtcaagatcttctttgctggggacactattcctaagagtcccttcgttgtgcaggttggggaagcctgcaatccaaatgcctgccgggccagtggccgaggcctacaacccaaaggcgtccgtatccgggagaccacagatttcaaggttgacaccaaagctgcaggaagtggggagctcggtgtaaccatgaagggtcctaagggtctggaggagctggtgaagcagaaagactttctggatggggtctacgcattcgagtattaccccagcaccccggggagatacagcattgccatcacatgggggggacaccacattccaaagagcccctttgaagttcaagttggccctgaagcgggtatgcagaaagtccgtgcttggggccctgggctccatggtgggattgtcgggcggtcagcggacttcgtggtagaatccattggctctgaagtggggtctctggggtttgccattgaaggcccctctcaggcaaagattgagtacaacgaccagaatgatggatcgtgtgatgtcaaatactggcccaaggagcctggcgaatatgctgttcacatcatgtgtgacgacgaagacatcaaggacagcccgtacatggccttcatccacccagccacgggaggctacaaccctgatctggttcgagcatacgggccaggtttggagaaatctggatgcattgtcaacaacctggccgagttcactgtggatcctaaggatgctggaaaagctcccttaaagatatttgctcaggatggggaaggccaacgcattgacatccagatgaagaaccggatggacggcacatatgcatgctcatacaccccggtgaaggccatcaagcacaccattgctgtggtctggggaggcgtgaacatcccgcacagcccctacagggtcaacatcgggcaaggtagccatcctcagaaggtcaaagtgtttgggccaggtgtggagagaagtggtctgaaggcaaatgaacctacacacttcacggtggactgtactgaggctggggaaggtgatgtcagtgttggcattaagtgtgatgcccgggtgttaagtgaagatgaggaagacgtggattttgacattattcacaatgccaatgatacgttcacagtcaaatatgtgcctcctgctgctgggcgatacactatcaaagttctctttgcatctcaggaaatccccgccagccctttcagagtcaaagttgacccttcccacgatgccagcaaagtgaaggcagaaggcccagggctcagcaaagcaggtgtggaaaatgggaaaccgacccacttcactgtctacaccaagggggctgggaaagccccgctcaacgtgcagttcaacagccctcttcctggcgatgcagtgaaggatttggatatcatcgataattatgactactctcacacggttaaatatacacccacccaacagggcaacatgcaggttctggtgacttacggtggcgatcccatccctaaaagccctttcactgtgggtgttgctgcaccgctggatctgagcaagataaaactcaatgggctggaaaacagggtggaagttgggaaggatcaggagttcaccgttgataccaggggggcaggaggccaggggaagctggacgtgacaatcctcagcccctctcggaaggtcgtgccatgcctagtgacacctgtgacaggccgggagaacagcacggccaagttcatccctcgggaggaggggctgtatgctgtagacgtgacctacgatggacaccctgtgcccgggagcccctacacagtggaggcctcgctgccaccagatcccagcaaggtgaaggcccacggtcccggcctcgaaggtggtctcgtgggcaagcctgccgagttcaccatcgataccaaaggagctggtactggaggtctgggcttaacggtggaaggtccgtgcgaggccaaaatcgagtgctccgacaatggtgatgggacctgctccgtctcttaccttcccacaaaacccggggagtacttcgtcaacatcctctttgaagaagtccacatacctgggtctcccttcaaagctgacattgaaatgccctttgacccctctaaagtcgtggcatcggggccaggtctcgagcacgggaaggtgggtgaagctggcctccttagcgtcgactgctcggaagcgggaccgggggccctgggcctggaagctgtctcggactcgggaacaaaagccgaagtcagtattcagaacaacaaagatggcacctacgcggtgacctacgtgcccctgacggccggcatgtacacgttgaccatgaagtatggtggcgaactcgtgccacacttccccgcccgggtcaaggtggagcccgccgtggacaccagcaggatcaaagtctttggaccaggaatagaagggaaagatgtgttccgggaagctaccaccgactttacagttgactctcggccgctgacccaggttgggggtgaccacatcaaggcccacattgccaacccctcaggggcctccaccgagtgctttgtcacagacaatgcggatgggacctaccaggtggaatacacaccctttgagaaaggtctccatgtagtggaggtgacatatgatgacgtgcctatcccaaacagtcccttcaaggtggctgtcactgaaggctgccagccatctagggtgcaagcccaaggacctggattgaaagaggcctttaccaacaagcccaatgtcttcaccgtggttaccagaggcgcaggaattggtgggcttggcataactgttgagggaccatcagagtcgaagataaattgcagagacaacaaggatggcagctgcagtgctgagtacattcctttcgcaccgggggattacgatgttaatatcacatatggaggagcccacatccccggcagccccttcagggttcctgtgaaggatgttgtggaccccagcaaggtcaagattgccggccccgggctgggctcaggcgtccgagcccgtgtcctgcagtccttcacggtggacagcagcaaggctggcctggctccgctggaagtgagggttctgggcccacgaggcttggtggagccagtgaacgtggtggacaatggagatggcacacacacagtaacctacaccccatctcaggagggaccttacatggtctcagttaaatatgctgatgaagagattcctcgcagtcccttcaaggtcaaggtccttcccacatatgatgccagcaaagtgactgccagtggccccggccttagttcctatggtgtgcctgccagtctacctgtggactttgcaattgatgcccgagatgccggggaaggcctgcttgctgttcaaataacggaccaagaaggaaaacccaaaagagccattgtccatgacaataaagatggcacgtatgctgtcacctacatccccgacaagactgggcgctatatgattggagtcacctacgggggtgacgacatcccactttctccttatcgcatccgagccacacagacgggtgatgccagcaagtgcctggccacgggtcctggaatcgcctccactgtgaaaactggcgaagaagtaggctttgtggttgatgccaagactgccgggaagggtaaagtgacctgcacggttctgaccccagatggcactgaggccgaggccgatgtcattgagaatgaagatggaacctatgacatcttctacacagctgccaagccgggcacatatgtgatctatgtgcgcttcggtggtgttgatattcctaacagccccttcactgtcatggccacagatggggaagtcacagccgtggaggaggcaccggtaaatgcatgtccccctggattcaggccctgggtgaccgaagaggcctatgtcccagtgagtgacatgaacggcctgggatttaagccttttgacctggtcattccgtttgctgtcaggaaaggagaaatcactggagaggtccacatgccttctgggaagacagccacacctgagattgtggacaacaaggacggcacggtcactgttagatatgcccccactgaggtcgggctccatgagatgcacatcaaatacatgggcagccacatccctgagagcccactccagttctacgtgaactaccccaacagtggaagtgtttctgcatacggtccaggcctcgtgtatggagtggccaacaaaactgccaccttcaccatcgtcacagaggatgcaggagaaggtggtctggacttggctattgagggcccctcaaaagcagaaatcagctgcattgacaataaagatgggacatgcacagtgacctacctgccgactctgccaggcgactacagcattctggtcaagtacaatgacaagcacatccctggcagccccttcacagccaagatcacagatgacagcaggcggtgctcccaggtgaagttgggctcagccgctgacttcctgctcgacatcagtgagactgacctcagcagcctgacggccagcattaaggccccatctggccgagacgagccctgtctcctgaagaggctgcccaacaaccacattggcatctccttcatcccccgggaagtgggcgaacatctggtcagcatcaagaaaaatggcaaccatgtggccaacagccccgtgtctatcatggtggtccagtcggagattggtgacgcccgccgagccaaagtctatggccgcggcctgtcagaaggccggactttcgagatgtctgacttcatcgtggacacaagggatgcaggttatggtggcatatccttggcggtggaaggccccagcaaagtggacatccagacggaggacctggaagatggcacctgcaaagtctcctacttccctaccgtgcctggggtttatatcgtctccaccaaattcgctgacgagcacgtgcctgggagcccatttaccgtgaagatcagtggggagggaagagtcaaagagagcatcacccgcaccagtcgggccccgtccgtggccactgtcgggagcatttgtgacctgaacctgaaaatcccagaaatcaacagcagtgatatgtcggcccacgtcaccagcccctctggccgtgtgactgaggcagagattgtgcccatggggaagaactcacactgcgtccggtttgtgccccaggagatgggcgtgcacacggtcagcgtcaagtaccgtgggcagcacgtcaccggcagccccttccagttcaccgtggggccacttggtgaaggaggcgcccacaaggtgcgggcaggaggccctggcctggagagaggagaagcgggagtcccagctgagttcagcatttggacccgggaagcaggcgctggaggcctctccatcgctgttgagggccccagtaaggccgagattacattcgatgaccataaaaatgggtcgtgcggtgtatcttatattgcccaagagcctggtaactacgaggtgtccatcaagttcaatgatgagcacatcccggaaagcccctacctggtgccggtcatcgcaccctccgacgacgcccgccgcctcactgttatgagccttcaggaatcgggattaaaagttaaccagccagcatcctttgctataaggttgaatggcgcaaaaggcaagattgatgcaaaggtgcacagcccctctggagccgtggaggagtgccacgtgtctgagctggagccagataagtatgctgttcgcttcatccctcatgagaatggtgtccacaccatcgatgtcaagttcaatgggagccacgtggttggaagccccttcaaagtgcgcgttggggagcctggacaagcggggaaccctgccctggtgtccgcctatggcacgggactcgaagggggcaccacaggtatccagtcggaattctttattaacaccacccgagcaggtccagggacattatccgtcaccatcgaaggcccatccaaggttaaaatggattgccaggaaacacctgaagggtacaaagtcatgtacacccccatggctcctggtaactacctgatcagcgtcaaatacggtgggcccaaccacatcgtgggcagtcccttcaaggccaaggtgacaggccagcgtctagttagccctggctcagccaacgagacctcatccatcctggtggagtcagtgaccaggtcgtctacagagacctgctatagcgccattcccaaggcatcctcggacgccagcaaggtgacctctaagggggcagggctctcaaaggcctttgtgggccagaagagttccttcctggtggactgcagcaaagctggctccaacatgctgctgatcggggtccatgggcccaccaccccctgcgaggaggtctccatgaagcatgtaggcaaccagcaatacaacgtcacatacgtcgtcaaggagaggggcgattatgtgctggctgtgaagtggggggaggaacacatccctggcagcccttttcatgtcacagtgccttaa

SEQ ID NO: 52 - DNA, 708 bp, Homo sapiens
atgacagtgctggcgccagcctggagcccaacaacctatctcctcctgctgctgctgctgagctcgggactcagtgggacccaggactgctccttccaacacagccccatctcctccgacttcgctgtcaaaatccgtgagctgtctgactacctgcttcaagattacccagtcaccgtggcctccaacctgcaggacgaggagctctgcgggggcctctggcggctggtcctggcacagcgctggatggagcggctcaagactgtcgctgggtccaagatgcaaggcttgctggagcgcgtgaacacggagatacactttgtcaccaaatgtgcctttcagcccccccccagctgtcttcgcttcgtccagaccaacatctcccgcctcctgcaggagacctccgagcagctggtggcgctgaagccctggatcactcgccagaacttctcccggtgcctggagctgcagtgtcagcccgactcctcaaccctgccacccccatggagtccccggcccctggaggccacagccccgacagccccgcagccccctctgctcctcctactgctgctgcccgtgggcctcctgctgctggccgctgcctggtgcctgcactggcagaggacgcggcggaggacaccccgccctggggagcaggtgccccccgtccccagtccccaggacctgctgcttgtggagcactga

SEQ ID NO: 53 - DNA, 1812 bp, Homo sapiens
atgaggcggaaggagaagcggctcctgcaggcggtggcgctggtgctggcggccctggtcctcctgcccaacgtggggctttgggcgctgtaccgcgagcggcagcccgacggcacccctgggggatcgggggcggcggtggcgccggcggcgggacagggctcacacagtcgacaaaagaaaacgtttttcttgggagatgggcagaagctgaaggactggcatgacaaggaggccatccggagggacgctcagcgcgtaggaaatggagaacaaggaagaccttaccccatgaccgatgctgagagagtggatcaggcataccgagaaaatggatttaacatctacgtcagtgataaaatctccttgaatcgctctctcccagatatccggcacccaaactgcaacagcaagcgctacctggagacacttcccaacacaagcatcatcatccccttccacaacgagggctggtcctccctcctccgcaccgtccacagtgtgctcaatcgctcgcctccagagctggtcgccgagattgtactggtcgacgacttcagtgatcgagagcacctgaagaagcctcttgaagactacatggcccttttccccagtgtgaggattcttcgaaccaagaaacgggaagggctgataaggacccgaatgctgggggcctcagtggcaactggggatgtcatcacattcttggattcacactgtgaagccaatgtcaactggcttccccccttgcttgaccgcattgctcggaaccgcaagaccattgtgtgcccgatgattgatgtaattgaccatgacgactttcggtacgagacacaggcaggggatgccatgcggggagcctttgactgggagatgtactacaagcggatcccgatccctccagaactgcagaaagctgaccccagcgacccatttgagtctcccgtgatggccggtggactgttcgccgtggatcggaagtggttctgggaactcggcgggtatgacccaggcttggagatctggggaggggagcagtatgaaatctccttcaaggtgtggatgtgtgggggccgcatggaggacatcccctgctccagggtgggccatatctacaggaagtatgtgccctacaaggtcccggccggagtcagcctggcccggaaccttaagcgggtggccgaagtgtggatggatgagtacgcagagtacatttaccagcgccggcctgaataccgccacctctccgctggggatgtcgcagtccagaaaaagctccgcagctcccttaactgcaagagtttcaagtggtttatgacgaagatagcctgggacctgcccaaattctacccacccgtggagcccccggctgcagcttggggggagatccgaaatgtgggcacagggctgtgtgcagacacaaagcacggggccttgggctccccactaaggctagagggctgcgtccgaggccgtggggaggctgcctggaacaacatgcaggtattcaccttcacctggagagaggacatccggcctggagacccccagcacaccaagaagttctgctttgatgccatttcccacaccagccctgtcacgctgtacgactgccacagcatgaagggcaaccagctgtggaaataccgcaaagacaagaccctgtaccaccctgtcagtggcagctgcatggactgcagtgaaagtgaccataggatcttcatgaacacctgcaacccatcctctctcacccagcagtggctgtttgaacacaccaactcaacagtcttggaaaaattcaataggaactga

SEQ ID NO: 54 - DNA, 1818 bp, Homo sapiens
atggtgagacaccagcccctgcagtactacgagccacagctgtgcctctcctgcctcacgggcatctacggctgccgttggaagcgctaccagcgctcccatgatgataccacaccgtgggagcgcctctggttcctgctcctcaccttcacctttggcctcacgctcacctggctttacttctggtgggaagtccacaatgactatgatgaattcaactggtacctctacaaccgcatgggctactggagcgactggcccgtacccatccttgtgaccacagctgctgccttcgcatacatcgctggcctcctggtcctggcactatgtcacattgccgtggggcagcagatgaacctgcactggctgcacaagatcgggctggtggtcatcctggcttccacggtggtggccatgtcggccgtggcccagctgtgggaggacgagtgggaggtgctgctgatctccctgcagggcacagcgccattcctgcatgtgggggctgtggcagcagtcaccatgctctcctggatcgtggcaggacagttcgcccgcgcagagcggacctcctcccaggtgaccattctctgtaccttcttcaccgtggtgtttgccctctacctggcccctctcaccatctcctctccctgcatcatggagaagaaagacctcggccccaagcctgctctcattggccaccgcggggcccccatgctggctccagagcacacgctcatgtccttccggaaggccctcgagcagaagctgtacgggctccaggctgacattaccatcagcctggacggcgtgcccttcctcatgcatgacaccaccctgcggcgcaccaccaacgtggaggaggagttcccggagctggcccgcaggcctgcctccatgcttaactggaccaccctgcagagactcaacgctggccagtggttcctgaagactgaccccttctggacagccagctccctgtcaccctccgaccacagagaggcccagaaccagtccatctgcagcctggcagagctcctggagctggccaagggcaatgccacactgctgctcaacctgcgtgacccgccccgggagcacccctaccgcagcagttttatcaacgtgactctggaggccgtgctgcactccggcttcccccagcaccaggtcatgtggctgcctagcaggcagaggcccctggtgcggaaggtggctcccggcttccaacagacatcaggctccaaggaggcagtcgccagcctgcggagaggccacatccagcggctgaacctgcgctacactcaggtgtcccgccaggagctcagggactacgcgtcctggaacctgagtgtgaacctctacacagtcaacgcaccgtggctcttctccctgctgtggtgtgcgggggtcccatccgtcacctctgacaactcccacgccctgtcccaggtgccttcccccctctggatcatgcccccggacgagtactgtctcatgtgggtcactgccgacctggtctccttcaccctcatcgtgggcatcttcgtgctccagaagtggcgcctgggtggcatacggagctacaaccctgagcagatcatgctgagtgctgcggtgcgccggaccagccgggacgtcagcatcatgaaggagaagcttattttctcagagatcagcgatggtgtagaggtctccgatgtgctctccgtatgttcagacaacagttatgacacatatgccaacagcaccgccacccctgtgggcccccgagggggtggcagccacaccaagaccctcatagagcggagtgggcgttag

SEQ ID NO: 55 - DNA, 1269 bp, Homo sapiens
atgccgcgctcatttctcgtcaaaagcaagaaggctcacagctaccaccagccgcgctccccaggaccagactattccctccgtttagagaatgtaccggcgcctagccgagcagacagcacttcaaatgcaggcggggcgaaggcggagccccgggaccgtttgtcccccgaatcgcagctgaccgaagccccagacagagcctccgcatccccagacagctgcgaaggcagcgtctgcgaacggagctcggagtttgaggacttctggaggcccccgtcaccctccgcgtctccagcctcggagaagtcaatgtgcccatcgctggacgaagcccagcccttccccctgcctttcaaaccgtactcatggagcggcctggcgggttctgacctgcggcacctggtgcagagctaccgaccgtgtggggccctggagcgtggcgctggcctgggcctcttctgcgaacccgccccggagcctggccacccggccgcgctgtacggcccgaagcgggctgccggcggcgcgggggccggggcgccagggagctgcagcgcaggggccggtgccaccgctggccctggcctagggctctacggcgacttcgggtctgcggcagccgggctgtatgagaggcccacggcagcggcgggcttgctgtaccccgagcgtggccacgggctgcacgcagacaagggcgctggcgtcaaggtggagtcggagctgctgtgcacccgcctgctgctgggcggcggctcctacaagtgcatcaagtgcagcaaggtgttctccacgccgcacgggctcgaggtgcacgtgcgcaggtcccacagcggtaccagaccctttgcctgcgagatgtgcggcaagaccttcgggcacgcggtgagcctggagcagcacaaagccgtgcactcgcaggaacggagctttgactgtaagatctgtgggaagagcttcaagaggtcatccacactgtccacacacctgcttatccactcagacactcggccctacccctgtcagtactgtggcaagaggttccaccagaagtcagacatgaagaaacacactttcatccacactggtgagaagcctcacaagtgccaggtgtgcggcaaggcattcagccagagctccaacctcatcacccacagccgcaaacacacaggcttcaagcccttcggctgcgacctctgtgggaagggtttccagaggaaggtggacctccgaaggcaccgggagacgcagcatgggctcaaatga

SEQ ID NO: 56 - DNA, 207 bp, Homo sapiens
atgtcagccactaacaacatagcccaggcccggaagctggtggaacagctacgcatagaagccgggattgagcgcatcaaggtctccaaagcggcgtctgacctcatgagctactgtgagcaacatgcccggaacgaccccctgctggtcggagtccctgcctcggagaacccctttaaggacaagaaaccttgtattattttataa

SEQ ID NO: 57 - DNA, 915 bp, Homo sapiens
atgctgagcactggggtggtgagcttcttctccctcaagtcggactcggcgcccccctggatggtgctggctgtgctgtggtgctccatggcacagacgctgctgctgccctccttcatctggtcctgcgagcgctaccgcgccgacgtgcgcacagtgtgggagcaatgcgtggccatcatgtctgaggaggatggagatgacgatgggggctgtgacgactatgcagagggccgagtttgcaaagttcgctttgatgctaacggagccacaggaccagggagccgggaccccgcccaggtgaagctgctgcctggaaggcacatgctcttccctcctcttgagagagtccactacttacaggtccccctatcccggcgtctgtcccatgatgagacaaacatcttctctacccctcgggaaccaggctccttcctgcacaagtggtcatcctctgatgacatccgggtcctcccagcccagagccgggccctcgggggtcctcctgagtacctgggacaaagacacaggttggaggacgaggaggacgaggaagaggctgaaggtggggggctggccagccttcgccaattcttggagagtggggttctggggtcaggtgggggacccccacggggtcctggcttcttccgggaggagatcaccaccttcatcgatgagacacctctgccttctccgactgcctcaccagggcactctcctcgtcggccccggccactgggcctctcaccccgccgactctcccttgggtcccctgagagcagagccgttggacttcctttgggactaagcgcagggagacgctgctccctgacggggggtgaagaaagtgcaagggcttggggaggatcctggggcccaggcaaccccatctttccccagctgaccctgtga

SEQ ID NO: 58 - DNA, 2082 bp, Homo sapiens
atgactccccagtcgctgctgcagacgacactgttcctgctgagtctgctcttcctggtccaaggtgcccacggcaggggccacagggaagactttcgcttctgcagccagcggaaccagacacacaggagcagcctccactacaaacccacaccagacctgcgcatctccatcgagaactccgaagaggccctcacagtccatgcccctttccctgcagcccaccctgcttcccgatccttccctgaccccaggggcctctaccacttctgcctctactggaaccgacatgctgggagattacatcttctctatggcaagcgtgacttcttgctgagtgacaaagcctctagcctcctctgcttccagcaccaggaggagagcctggctcagggccccccgctgttagccacttctgtcacctcctggtggagccctcagaacatcagcctgcccagtgccgccagcttcaccttctccttccacagtcctccccacacggccgctcacaatgcctcggtggacatgtgcgagctcaaaagggacctccagctgctcagccagttcctgaagcatccccagaaggcctcaaggaggccctcggctgcccccgccagccagcagttgcagagcctggagtcgaaactgacctctgtgagattcatgggggacatggtgtccttcgaggaggaccggatcaacgccacggtgtggaagctccagcccacagccggcctccaggacctgcacatccactcccggcaggaggaggagcagagcgagatcatggagtactcggtgctgctgcctcgaacactcttccagaggacgaaaggccggagcggggaggctgagaagagactcctcctggtggacttcagcagccaagccctgttccaggacaagaattccagccaagtcctgggtgagaaggtcttggggattgtggtacagaacaccaaagtagccaacctcacggagcccgtggtgctcactttccagcaccagctacagccgaagaatgtgactctgcaatgtgtgttctgggttgaagaccccacattgagcagcccggggcattggagcagtgctgggtgtgagaccgtcaggagagaaacccaaacatcctgcttctgcaaccacttgacctactttgcagtgctgatggtctcctcggtggaggtggacgccgtgcacaagcactacctgagcctcctctcctacgtgggctgtgtcgtctctgccctggcctgccttgtcaccattgccgcctacctctgctccagggtgcccctgccgtgcaggaggaaacctcgggactacaccatcaaggtgcacatgaacctgctgctggccgtcttcctgctggacacgagcttcctgctcagcgagccggtggccctgacaggctctgaggctggctgccgagccagtgccatcttcctgcacttctccctgctcacctgcctttcctggatgggcctcgaggggtacaacctctaccgactcgtggtggaggtctttggcacctatgtccctggctacctactcaagctgagcgccatgggctggggcttccccatctttctggtgacgctggtggccctggtggatgtggacaactatggccccatcatcttggctgtgcataggactccagagggcgtcatctacccttccatgtgctggatccgggactccctggtcagctacatcaccaacctgggcctcttcagcctggtgtttctgttcaacatggccatgctagccaccatggtggtgcagatcctgcggctgcgcccccacacccaaaagtggtcacatgtgctgacactgctgggcctcagcctggtccttggcctgccctgggccttgatcttcttctcctttgcttctggcaccttccagcttgtcgtcctctaccttttcagcatcatcacctccttccaaggcttcctcatcttcatctggtactggtccatgcggctgcaggcccggggtggcccctcccctctgaagagcaactcagacagcgccaggctccccatcagctcgggcagcacctcgtccagccgcatctag

SEQ ID NO: 59 - DNA, 1341 bp, Homo sapiens
atggcggcgcgcaagggtcggcggcgcacgtgtgaaaccggggaacccatggaagccgagtccggcgacacaagttccgagggcccggcccaggtctacctgcccggccgggggccgccgctacgcgaaggggaggagctggtcatggacgaggaggcctatgtgctctaccaccgagcgcagactggcgccccctgtctcagctttgacatagtccgggatcacctgggagacaaccggacagagcttcctcttacactttacttgtgtgctgggacccaggctgagagcgcccagagcaacagactgatgatgcttcggatgcacaatctgcatgggacaaagcccccaccctcagagggcagtgatgaagaagaagaggaggaagatgaagaggatgaagaagagcggaaacctcagctggagctggccatggtgccccactatggtggcatcaaccgagttcgggtgtcatggctgggtgaagagcctgtggctggggtgtggtcagagaagggccaggtggaggtgtttgcgctgcggcggcttctgcaggtggtggaggagccccaggccctggcagccttcctccgggatgagcaggcccaaatgaagcccatcttctccttcgctggacacatgggcgagggctttgcccttgactggtccccccgggtgaccggtcgcctgctgaccggtgactgtcaaaagaacatccacctctggacacctacggacggcggctcctggcacgtggaccagcggccattcgtgggccacacacgctctgtggaggacctgcagtggtcaccgactgagaacacggtgtttgcctcctgctcagctgacgcctccatccgcatctgggacatccgggcagcccccagcaaggcctgcatgctcaccacagccaccgcccatgatggggacgtcaatgtcatcagctggagccgccgggagcccttcctgctcagtggcggggatgatggggccctcaagatctgggaccttcggcagttcaagtctggttccccagtggccaccttcaagcagcacgtggcccccgtgacctccgtcgagtggcacccccaggacagcggggtctttgcagcctcgggtgcagaccaccagatcacacagtgggacctggcagtggagcgggaccctgaggcgggcgacgtggaggccgaccccggactggccgacctcccgcagcagctgctgttcgtgcaccagggcgagaccgagctgaaggagctgcactggcacccgcagtgcccagggctcctggtcagcacggcgctgtcaggcttcaccatcttccgcaccatcagcgtctga

SEQ ID NO: 60 - DNA, 789 bp, Homo sapiens
atgaggaactcctatagatttctggcatcctctctctcagttgtcgtttctctcctgctaattcctgaagatgtctgtgaaaaaattattggaggaaatgaagtaactcctcattcaagaccctacatggtcctacttagtcttgacagaaaaaccatctgtgctggggctttgattgcaaaagactgggtgttgactgcagctcactgtaacttgaacaaaaggtcccaggtcattcttggggctcactcaataaccagggaagagccaacaaaacagataatgcttgttaagaaagagtttccctatccatgctatgacccagccacacgcgaaggtgaccttaaacttttacagctgatggaaaaagcaaaaattaacaaatatgtgactatccttcatctacctaaaaagggggacgatgtgaaaccaggaaccatgtgccaagttgcagggtggggcaggactcacaatagtgcatcttggtccgatactctgagagaagtcaatatcaccatcatagacagaaaagtctgcaatgatcgaaatcactataattttaaccctgtgattggaatgaatatggtttgtgctggaagcctccgaggtggaagagactcgtgcaatggagattctggaagccctttgttgtgcgagggtgttttccgaggggtcacttcctttggccttgaaaataaatgcggagaccctcgtgggcctggtgtctatattcttctctcaaagaaacacctcaactggataattatgactatcaagggagcagtttaa

SEQ ID NO: 61 - DNA, 3075 bp, Homo sapiens
atggagcggaggtcgcggaggaagtcgcggcgcaacgggcgctcgaccgcgggcaaggccgccgcgacccagcccgcgaagtctccgggcgcacagctctggctctttcccagcgccgcgggcctccaccgcgcgctgctccggagggtggaggtgacgcgccaactctgctgctcgccggggcgcctcgcggtcttggaacgcggcggggcgggcgtccaggttcaccagctgctcgccgggagcggcggcgcccggacgccgaaatgcattaaattaggaaaaaacatgaagatacattccgtggaccaaggagcagagcacatgctgattctctcatcagatggaaaaccatttgagtatgacaactatagcatgaaacatctaaggtttgaaagcattttacaagaaaaaaaaataattcagatcacatgtggagattaccattctcttgcactctcaaaaggtggtgagctttttgcctggggacagaacctgcatgggcagcttggagttggaaggaaatttccctcaaccaccacaccacagattgtggagcacctcgcaggagtacccttggctcagatttctgccggagaagcccacagcatggccttatccatgtctggcaacatttattcatggggaaaaaatgaatgtggacaactaggcctgggccacactgagagtaaagatgatccatcccttattgaaggactagacaatcagaaagttgaatttgtcgcttgtggtggctctcacagtgccctactcacacaggatgggctgctgtttactttcggtgctggaaaacatgggcaacttggtcataattcaacacagaatgagctaagaccctgtttggtggctgagcttgttgggtatagagtgactcagatagcatgtggaaggtggcacacacttgcctatgtttctgatttgggaaaggtcttttcctttggttctggaaaagatggacaactgggaaatggtggaacacgtgaccagctgatgccgcttccagtgaaagtatcatcaagtgaagaactcaaacttgaaagccatacctcagaaaaggagttaataatgattgctggagggaatcaaagcattttgctctggataaagaaagagaattcatatgttaatctgaagaggacaattcctactctgaatgaagggactgtaaagagatggattgctgatgtggagactaaacggtggcagagcacaaaaagggaaatccaagagatattttcatctcctgcttgtctaactggaagttttttaaggaaaagaagaactacagaaatgatgcctgtttatttggacttaaataaagcaagaaacatcttcaaggagttaacccaaaaggactggattactaacatgataaccacctgcctcaaagataatctgctcaaaagacttccatttcattctccaccccaagaagctttagaaattttcttccttctcccagaatgtcctatgatgcatatttccaacaactgggagagccttgtggttccatttgcaaaggttgtttgtaaaatgagtgaccagtcttcactggttctggaagagtattgggcaactctgcaagaatccactttcagcaaactggtccagatgtttaaaacagccgtcatatgccagttggattactgggatgaaagtgctgaggagaatggtaatgttcaagctctcctagaaatgttgaagaagctgcacagggtaaaccaggtgaaatgtcaactacctgaaagtattttccaagtagacgaactcttgcaccgtctcaatttttttgtagaagtatgcagaaggtacttgtggaaaatgactgtggacgcttcagaaaatgtacaatgctgcgtcatattcagtcactttccatttatctttaataatctgtcgaaaattaaactactacatacagacacacttttaaaaatagagagtaaaaaacataaagcttatcttaggtcggcagcaattgaggaagaaagagagtctgaattcgctttgaggcccacgtttgatctaacagtcagaaggaatcacttgattgaggatgttttgaatcagctaagtcaatttgagaatgaagacctgaggaaagagttatgggtttcatttagtggagaaattgggtatgacctcggaggagtcaagaaagagttcttctactgtctgtttgcagagatgatccagccggaatatgggatgttcatgtatcctgaaggggcttcctgcatgtggtttcctgtcaagcctaaatttgagaagaaaagatacttcttttttggggttctatgtggactttccctgttcaattgcaatgttgccaaccttcctttcccactggcactgtttaagaaacttttggaccaaatgccatcattggaagacttgaaagaactcagtcctgatttgggaaagaatttgcaaacacttctggatgatgaaggtgataactttgaggaagtattttacatccattttaatgtgcactgggacagaaacgacacaaacttaattcctaatggaagtagcataactgtcaaccagactaacaagagagactatgtttctaagtatatcaattacattttcaacgactctgtaaaggcggtttatgaagaatttcggagaggattttataaaatgtgcgacgaagacattatcaaattattccaccccgaagaactgaaggatgtgattgttggaaatacagattatgattggaaaacatttgaaaagaatgcacgttatgaaccaggatataacagttcacatcccaccatagtgatgttttggaaggctttccacaaattgactctggaagaaaagaaaaaattccttgtatttcttacaggaactgacagactacaaatgaaagatttaaataatatgaaaataacattttgctgtcctgaaagttggaatgaaagagaccctataagagcactgacatgtttcagtgtcctcttcctccctaaatattctacaatggaaacagttgaagaagcgcttcaagaagccatcaacaacaacagaggatttggctga

SEQ ID NO: 62 - DNA, 3069 bp, Homo sapiens
atgtacttctgttggggcgccgactccagggagctgcagcgccggaggacggcgggcagccccggggctgagctactgcaggcggccagcggggagcgccactctctgctgctgctgaccaaccacagggtcctctcgtgcggagacaacagcaggggtcagctgggccgcaggggcgcgcagcgcggggagctgccagaaccaattcaggcattggaaaccctaattgttgatctcgtgagctgcgggaaggagcactccctggctgtgtgccacaaaggaagggtcttcgcatggggagctggttctgaagggcagctggggattggagaattcaaggaaataagtttcacacctaagaaaataatgactctgaatgatataaaaataatacaagtttcctgtggacactaccactccctggcattatcaaaagatagccaagtgttttcgtggggaaagaacagccatgggcagctgggcttggggaaggagttcccctcccaagccagcccgcagagggtgaggtccctggaggggatcccactggctcaggtggctgccggaggggctcacagctttgccctgtctctctgtgggacttcgtttggctggggaagtaacagtgccgggcagctggccctcagtgggcgtaatgtcccagtgcaaagcaacaagcctctctcagtcggtgcactgaagaatctaggtgtggtttatatcagctgtggtgatgcacacactgcggtgcttacccaggacgggaaagtgttcacatttggagacaatcgctctggacagctgggatacagccccactcctgagaagagaggtccacaacttgtggaaagaattgatggcctagtttcgcagatagattgtggaagttatcacaccctggcatatgtgcacaccactggtcaggtggtatcttttggtcatggaccaagtgacacaagcaagccaactcatccggaggccctgacagagaactttgacattagctgcctgatttctgctgaagacttcgtggatgttcaagtcaaacacatttttgctggaacatatgccaactttgtgacaactcatcaggatactagttccacacgtgctcccgggaaaaccctgccagaaataagccgaattagccagtccatggcagaaaaatggatagcagtgaaaagaagaagtactgaacatgaaatggctaaaagtgaaattagaatgatattttcatctcctgcttgtctgactgcaagttttttaaagaaaagaggaactggagaaacgacttccattgatgtggacttagaaatggcaagagataccttcaagaagttaacaaaaaaggaatggatttcttccatgataactacgtgtctcgaggatgatctgctcagagctcttccatgccattctccacaccaagaagctttatcagttttcctcctgctcccagaatgtcctgtgatgcatgattctaagaactggaagaacctggtggttccatttgcaaaggctgtgtgtgaaatgagtaaacaatctttgcaagtcctaaagaagtgttgggcatttttgcaagaatcttctctgaatccgctgatccagatgcttaaagcagccatcatctctcagctgcttcatcagactaaaaccgaacaggatcactgtaatgttaaagctcttttaggaatgatgaaagaactgcataaggtaaacaaagctaactgtcgactaccagaaaatactttcaacataaatgaactctccaacttattaaacttttatatagatagaggaagacagctctttcgggataaccacctgatacctgcagaaacccccagtcctgttattttcagtgattttccatttatctttaattcgctatccaaaattaaattattgcaagctgattcacatataaagatgcagatgtcagaaaagaaagcatacatgcttatgcatgaaacaattctgcaaaaaaaggatgaatttcctccatcacccagatttatacttagagtcagacgaagtcgcctggttaaagatgctctgcgtcaattaagtcaagctgaagctactgacttctgcaaagtattagtggttgaatttattaatgaaatttgtcctgagtctggaggggttagttcagagttcttccactgtatgtttgaagagatgaccaagccagaatatggaatgttcatgtatcctgaaatgggttcctgcatgtggtttcctgccaagcctaaacctgagaagaaaagatatttcctctttggaatgctgtgtggactctccttattcaatttaaatgttgctaaccttcctttcccactggctctgtataaaaaacttctggaccaaaagccatcattggaagatttaaaagaactcagtcctcggttggggaagagtttgcaagaagttctagatgatgctgctgatgacattggagatgcgctctgcatacgcttttctatacactgggaccaaaatgatgttgacttaattccaaatgggatctccatacctgtggaccaaaccaacaagagagactatgtttctaagtatattgattacattttcaacgtctctgtaaaagcagtttatgaggaatttcagagaggattttatagagtctgtgagaaggagatacttagacatttctaccctgaagaactaatgacagcaatcattggaaatactgattatgactggaaacagtttgaacagaattcaaagtatgagcaaggataccaaaaatcacatcctactatacagttgttttggaaggctttccacaaactaaccttggatgaaaagaaaaaattcctctttttccttacaggacgtgataggctgcatgcaagaggcatacagaaaatggaaatagtatttcgctgtcctgaaactttcagtgaaagagatcacccaacatcaataacttgtcataatattctctccctccctaagtattctacaatggaaagaatggaggaagcacttcaagtagccatcaacaacaacagaggatttgtctcacccatgctcacacagtcataa

SEQ ID NO: 63 - DNA, 1848 bp, Homo sapiens
atggtgtctgggcccttggcactccggtggtgcgcgtgggcagggcgcggggacatggggcccgacatggagctgcccagccactcgaagcagctcctgctgcagctgaaccagcagaggaccaagggcttcctgtgtgacgtcatcatcatggtggagaactccatcttccgggcccacaagaacgtcctagccgccagcagcatctatttcaagtccctggtcctgcacgacaacctcatcaacctggacacagacatggtcagctccacagtgttccagcagatcttggacttcatctacacaggcaagctgctgcccagcgaccagccagccgagcccaacttcagcaccctcctcactgccgccagctacctccagctgcccgagttggcagccctctgccgccgcaaactcaagcgagccggcaagccctttggctctgggagggcggggtccactggcatggggcggcccccccgcagccagcggctgtccacggcctctgtcatccaagctcggtatcaggggctcgtggatgggcgcaagggggcccacgccccccaggagctcccccaagccaaaggctcagacgatgaactctttcttggtggctctaaccaggatagcgtgcaaggtctgggccgggctgtctgcccagctggcggggaggcgggtctggggggctgcagcagcagcaccaacgggagcagcgggggctgcgagcaggagctgggcttggacctgtccaagaaaagcccacccttgccccctgccaccccaggtccccacctcactcccgatgacgcagcccagctgagcgacagccaacatggctcgccccctgcggcctctgctcctcccgttgccaacagtgcctcttattctgagctggggggcacccctgatgagcccatggatctggagggggccgaggacaaccacctgagcctgctggaggcgcctggtgggcagcctcggaagagcctccggcactccactcggaagaaggagtggggcaagaaggagcctgtggctggctccccctttgagcggagagaagcagggcccaagggtccctgcccgggagaggagggtgagggggtcggggacagggttcccaatggcatcctggctagtggggctggccctagcgggccctatggggagcccccctacccctgcaaggaggaggaggagaacggcaaggatgcaagtgaagacagtgcgcagagcgggagcgaggggggcagcggccatgccagcgcccactacatgtaccggcaggagggctacgagacggtgtcctacggggacaacttgtatgtgtgcattccctgcgccaagggcttccccagctctgagcagctcaatgcgcacgtggagactcacacggaggaagagctgttcatcaaggaagagggggcctacgagacaggcagtgggggtgccgaggaggaggccgaggacctgtcagcacccagtgcggcctacacggctgagccccggcccttcaagtgttcggtctgcgagaagacctacaaggacccagccacgctgcggcagcacgagaagacgcactggctgacacggcccttcccctgcaacatctgtggcaaaatgttcacgcagcgcggcaccatgacgcgtcacatgcggagccacctgggcctgaagcccttcgcctgcgatgagtgtggcatgcgcttcacccgtcagtaccgcctcacggagcacatgcgtgtgcactcgggcgagaaaccttacgagtgccagctgtgcgggggcaagttcacccagcagcgcaacctcatcagccacctgcgcatgcacacctccccctcctag

SEQ ID NO: 64 - DNA, 786 bp, Homo sapiens
atggcgtctcagctccagaaccgactccgctccgcactggccttggtcacaggtgcggggagcggcatcggccgagcggtcagtgtacgcctggccggagagggggccaccgtagctgcctgcgacctggaccgggcagcggcacaggagacggtgcggctgctgggcgggccagggagcaaggaggggccgccccgagggaaccatgctgccttccaggctgacgtgtctgaggccagggccgccaggtgcctgctggaacaagtgcaggcctgcttttctcgcccaccatctgtcgttgtgtcctgtgcgggcatcacccaggatgagtttctgctgcacatgtctgaggatgactgggacaaagtcatagctgtcaacctcaagggcaccttcctagtcactcaggctgcagcacaagccctggtgtccaatggttgtcgtggttccatcatcaacatcagtagcatcgtaggaaaggtggggaacgtggggcagacaaactatgcagcatccaaggctggagtgattgggctgacccagaccgcagcccgggagcttggacgacatgggatccgctgtaactctgtcctcccagggttcattgcaacacccatgacacagaaagtgccacagaaagtggtggacaagattactgaaatgatcccgatgggacacttgggggaccctgaggatgtggcagatgtggtcgcattcttggcatctgaagatagtggatacatcacagggacctcagtggaagtcactggaggtcttttcatgtaa

SEQ ID NO: 65 - DNA, 828 bp, Homo sapiens
atgtcctctttcggttacaggaccctgactgtggccctcttcaccctgatctgctgtccaggatcggatgagaaggtattcgaggtacacgtgaggccaaagaagctggcggttgagcccaaagggtccctcgaggtcaactgcagcaccacctgtaaccagcctgaagtgggtggtctggagacctctctagataagattctgctggacgaacaggctcagtggaaacattacttggtctcaaacatctcccatgacacggtcctccaatgccacttcacctgctccgggaagcaggagtcaatgaattccaacgtcagcgtgtaccagcctccaaggcaggtcatcctgacactgcaacccactttggtggctgtgggcaagtccttcaccattgagtgcagggtgcccaccgtggagcccctggacagcctcaccctcttcctgttccgtggcaatgagactctgcactatgagaccttcgggaaggcagcccctgctccgcaggaggccacagccacattcaacagcacggctgacagagaggatggccaccgcaacttctcctgcctggctgtgctggacttgatgtctcgcggtggcaacatctttcacaaacactcagccccgaagatgttggagatctatgagcctgtgtcggacagccagatggtcatcatagtcacggtggtgtcggtgttgctgtccctgttcgtgacatctgtcctgctctgcttcatcttcggccagcacttgcgccagcagcggatgggcacctacggggtgcgagcggcttggaggaggctgccccaggccttccggccatag

SEQ ID NO: 66 - DNA, 2190 bp, Homo sapiens
atgggaaaaaaatacaagaacattgttctactaaaaggattagaggtcatcaatgattatcattttagaatggttaagtccttactgagcaacgatttaaaacttaatttaaaaatgagagaagagtatgacaaaattcagattgctgacttgatggaagaaaagttccgaggtgatgctggtttgggcaaactaataaaaattttcgaagatataccaacgcttgaagacctggctgaaactcttaaaaaagaaaagttaaaagtaaaaggaccagccctatcaagaaagaggaagaaggaagtggatgctacttcacctgcaccctccacaagcagcactgtcaaaactgaaggagcagaggcaactcctggagctcagaaaagaaaaaaatcaaccaaagaaaaggctggacccaaagggagtaaggtgtccgaggaacagactcagcctccctctcctgcaggagccggcatgtccacagccatgggccgttccccatctcccaagacctcattgtcagctccacccaacagttcttcaactgagaacccgaaaacagtggccaaatgtcaggtaactcccagaagaaatgttctccaaaaacgcccagtgatagtgaaggtactgagtacaacaaagccatttgaatatgagaccccagaaatggagaaaaaaataatgtttcatgctacagtggctacacagacacagttcttccatgtgaaggttttaaacaccagcttgaaggagaaattcaatggaaagaaaatcatcatcatatcagattatttggaatatgatagtctcctagaggtcaatgaagaatctactgtatctgaagctggtcctaaccaaacgtttgaggttccaaataaaatcatcaacagagcaaaggaaactctgaagattgatattcttcacaaacaagcttcaggaaatattgtatatggggtatttatgctacataagaaaacagtaaatcagaagaccacaatctacgaaattcaggatgatagaggaaaaatggatgtagtggggacaggacaatgtcacaatatcccctgtgaagaaggagataagctccaacttttctgctttcgacttagaaaaaagaaccagatgtcaaaactgatttcagaaatgcatagttttatccagataaagaaaaaaacaaacccgagaaacaatgaccccaagagcatgaagctaccccaggaacagcgtcagcttccatatccttcagaggccagcacaaccttccctgagagccatcttcggactcctcagatgccaccaacaactccatccagcagtttcttcaccaagaaaagtgaagacacaatctccaaaatgaatgacttcatgaggatgcagatactgaaggaagggagtcattttccaggaccgttcatgaccagcataggcccagctgagagccatccccacactcctcagatgcctccatcaacaccaagcagcagtttcttaaccacgttgaaaccaagactgaagactgaacctgaagaagtttccatagaagacagtgcccagagtgacctcaaagaagtgatggtgctgaacgcaacagaatcatttgtatatgagcccaaagagcagaagaaaatgtttcatgccacagtggcaactgagaatgaagtcttccgagtgaaggtttttaatattgacctaaaggagaagttcaccccaaagaagatcattgccatagcaaattatgtttgccgcaatgggttcctggaggtatatcctttcacacttgtggctgatgtgaatgctgaccgaaacatggagatcccaaaaggattgattagaagtgccagcgtaactcctaaaatcaatcagctttgctcacaaactaaaggaagttttgtgaatggggtgtttgaggtacataagaaaaatgtaaggggtgaattcacttattatgaaatacaagataatacagggaagatggaagtggtggtgcatggacgactgaccacaatcaactgtgaggaaggagataaactgaaactcacctgctttgaattggcaccgaaaagtgggaataccggggagttgagatctgtaattcatagtcacatcaaggtcatcaagaccaggaaaaacaagaaagacatactcaatcctgattcaagtatggaaacttcaccagactttttcttctaa

SEQ ID NO: 67 - DNA, 1335 bp, Homo sapiens
atggcagtgacaactcgtttgacatggttgcacgaaaagatcctgcaaaatcattttggagggaagcggcttagccttctctataagggtagtgtccatggattccgtaatggagttttgcttgacagatgttgtaatcaagggcctactctaacagtgatttatagtgaagatcatattattggagcatatgcagaagagagttaccaggaaggaaagtatgcttccatcatcctttttgcacttcaagatactaaaatttcagaatggaaactaggactatgtacaccagaaacactgttttgttgtgatgttacaaaatataactccccaactaatttccagatagatggaagaaatagaaaagtgattatggacttaaagacaatggaaaatcttggacttgctcaaaattgtactatctctattcaggattatgaagtttttcgatgcgaagattcactggatgaaagaaagataaaaggggtcattgagctcaggaagagcttactgtctgccttgagaacttatgaaccatatggatccctggttcaacaaatacgaattctgctgctgggtccaattggagctgggaagtccagctttttcaactcagtgaggtctgttttccaagggcatgtaacgcatcaggctttggtgggcactaatacaactgggatatctgagaagtataggacatactctattagagacgggaaagatggcaaatacctgccgtttattctgtgtgactcactggggctgagtgagaaagaaggcggcctgtgcagggatgacatattctatatcttgaacggtaacattcgtgatagataccagtttaatcccatggaatcaatcaaattaaatcatcatgactacattgattccccatcgctgaaggacagaattcattgtgtggcatttgtatttgatgccagctctattcaatacttctcctctcagatgatagtaaagatcaaaagaattcgaagggagttggtaaacgctggtgtggtacatgtggctttgctcactcatgtggatagcatggatttgattacaaaaggtgaccttatagaaatagagagatgtgagcctgtgaggtccaagctagaggaagtccaaagaaaacttggatttgctctttctgacatctcggtggttagcaattattcctctgagtgggagctggaccctgtaaaggatgttctaattctttctgctctgagacgaatgctatgggctgcagatgacttcttagaggatttgccttttgagcaaatagggaatctaagggaggaaattatcaactgtgcacaaggaaaaaaatag

SEQ ID NO: 68 - DNA, 378 bp, Homo sapiens
atgcacaaggaggaacatgaggtggctgtgctggggccaccccccagcaccatccttccaaggtccaccgtgatcaacatccacagcgagacctccgtgcccgaccatgtcgtctggtccctgttcaacaccctcttcttgaactggtgctgtctgggcttcatagcattcgcctactccgtgaagtctagggacaggaagatggttggcgacgtgaccggggcccaggcctatgcctccaccgccaagtgcctgaacatctgggccctgattctgggcatcctcatgaccattggattcatcctgttactggtattcggctctgtgacagtctaccatattatgttacagataatacaggaaaaacggggttactag

SEQ ID NO: 69 - DNA, 1260 bp, Homo sapiens
atgaataggcacctctggaagagccaactgtgtgagatggtgcagcccagtggtggcccggcagcagatcaggacgtactgggcgaagagtctcctctggggaagccagccatgctgcacctgccttcagaacagggcgctcctgagaccctccagcgctgcctggaggagaatcaagagctccgagatgccatccggcagagcaaccagattctgcgggagcgctgcgaggagcttctgcatttccaagccagccagagggaggagaaggagttcctcatgtgcaagttccaggaggccaggaaactggtggagagactcggcctggagaagctcgatctgaagaggcagaaggagcaggctctgcgggaggtggagcacctgaagagatgccagcagcagatggctgaggacaaggcctctgtgaaagcccaggtgacgtccttgctcggggagctgcaggagagccagagtcgcttggaggctgccactaaggaatgccaggctctggagggtcgggcccgggcggccagcgagcaggcgcggcagctggagagtgagcgcgaggcgctgcagcagcagcacagcgtgcaggtggaccagctgcgcatgcagggccagagcgtggaggccgcgctccgcatggagcgccaggccgcctcggaggagaagaggaagctggcccagttgcaggtggcctatcaccagctcttccaagaatacgacaaccacatcaagagcagcgtggtgggcagtgagcggaagcgaggaatgcagctggaagatctcaaacagcagctccagcaggccgaggaggccctggtggccaaacaggaggtgatcgataagctgaaggaggaggccgagcagcacaagattgtgatggagaccgttccggtgctgaaggcccaggcggatatctacaaggcggacttccaggctgagaggcaggcccgggagaagctggccgagaagaaggagctcctgcaggagcagctggagcagctgcagagggagtacagcaaactgaaggccagctgtcaggagtcggccaggatcgaggacatgaggaagcggcatgtcgaggtctcccaggcccccttgccccccgcccctgcctacctctcctctcccctggccctgcccagccagaggaggagcccccccgaggagccacctgacttctgctgtcccaagtgccagtatcaggcccctgatatggacaccctgcagatacatgtcatggagtgcattgagtag

SEQ ID NO: 70 - DNA, 2478 bp, Homo sapiens
atggggtggctttgctctgggctcctgttccctgtgagctgcctggtcctgctgcaggtggcaagctctgggaacatgaaggtcttgcaggagcccacctgcgtctccgactacatgagcatctctacttgcgagtggaagatgaatggtcccaccaattgcagcaccgagctccgcctgttgtaccagctggtttttctgctctccgaagcccacacgtgtatccctgagaacaacggaggcgcggggtgcgtgtgccacctgctcatggatgacgtggtcagtgcggataactatacactggacctgtgggctgggcagcagctgctgtggaagggctccttcaagcccagcgagcatgtgaaacccagggccccaggaaacctgacagttcacaccaatgtctccgacactctgctgctgacctggagcaacccgtatccccctgacaattacctgtataatcatctcacctatgcagtcaacatttggagtgaaaacgacccggcagatttcagaatctataacgtgacctacctagaaccctccctccgcatcgcagccagcaccctgaagtctgggatttcctacagggcacgggtgagggcctgggctcagtgctataacaccacctggagtgagtggagccccagcaccaagtggcacaactcctacagggagcccttcgagcagcacctcctgctgggcgtcagcgtttcctgcattgtcatcctggccgtctgcctgttgtgctatgtcagcatcaccaagattaagaaagaatggtgggatcagattcccaacccagcccgcagccgcctcgtggctataataatccaggatgctcaggggtcacagtgggagaagcggtcccgaggccaggaaccagccaagtgcccacactggaagaattgtcttaccaagctcttgccctgttttctggagcacaacatgaaaagggatgaagatcctcacaaggctgccaaagagatgcctttccagggctctggaaaatcagcatggtgcccagtggagatcagcaagacagtcctctggccagagagcatcagcgtggtgcgatgtgtggagttgtttgaggccccggtggagtgtgaggaggaggaggaggtagaggaagaaaaagggagcttctgtgcatcgcctgagagcagcagggatgacttccaggagggaagggagggcattgtggcccggctaacagagagcctgttcctggacctgctcggagaggagaatgggggcttttgccagcaggacatgggggagtcatgccttcttccaccttcgggaagtacgagtgctcacatgccctgggatgagttcccaagtgcagggcccaaggaggcacctccctggggcaaggagcagcctctccacctggagccaagtcctcctgccagcccgacccagagtccagacaacctgacttgcacagagacgcccctcgtcatcgcaggcaaccctgcttaccgcagcttcagcaactccctgagccagtcaccgtgtcccagagagctgggtccagacccactgctggccagacacctggaggaagtagaacccgagatgccctgtgtcccccagctctctgagccaaccactgtgccccaacctgagccagaaacctgggagcagatcctccgccgaaatgtcctccagcatggggcagctgcagcccccgtctcggcccccaccagtggctatcaggagtttgtacatgcggtggagcagggtggcacccaggccagtgcggtggtgggcttgggtcccccaggagaggctggttacaaggccttctcaagcctgcttgccagcagtgctgtgtccccagagaaatgtgggtttggggctagcagtggggaagaggggtataagcctttccaagacctcattcctggctgccctggggaccctgccccagtccctgtccccttgttcacctttggactggacagggagccacctcgcagtccgcagagctcacatctcccaagcagctccccagagcacctgggtctggagccgggggaaaaggtagaggacatgccaaagcccccacttccccaggagcaggccacagacccccttgtggacagcctgggcagtggcattgtctactcagcccttacctgccacctgtgcggccacctgaaacagtgtcatggccaggaggatggtggccagacccctgtcatggccagtccttgctgtggctgctgctgtggagacaggtcctcgccccctacaacccccctgagggccccagacccctctccaggtggggttccactggaggccagtctgtgtccggcctccctggcaccctcgggcatctcagagaagagtaaatcctcatcatccttccatcctgcccctggcaatgctcagagctcaagccagacccccaaaatcgtgaactttgtctccgtgggacccacatacatgagggtctcttag

SEQ ID NO: 71 - DNA, 804 bp, Homo sapiens
atggtgaagattagcttccagcccgccgtggctggcatcaagggcgacaaggctgacaaggcgtcggcgtcggcccctgcgccggcctcggccaccgagatcctgctgacgccggctagggaggagcagcccccacaacatcgatccaagagggggggctcagtgggcggcgtgtgctacctgtcgatgggcatggtcgtgctgctcatgggcctcgtgttcgcctctgtctacatctacagatacttcttccttgcgcagctggcccgagataacttcttccgctgtggtgtgctgtatgaggactccctgtcctcccaggtccggactcagatggagctggaagaggatgtgaaaatctacctcgacgagaactacgagcgcatcaacgtgcctgtgccccagtttggcggcggtgaccctgcagacatcatccatgacttccagcggggtctgactgcgtaccatgatatctccctggacaagtgctatgtcatcgaactcaacaccaccattgtgctgccccctcgcaacttctgggagctcctcatgaacgtgaagagggggacctacctgccgcagacgtacatcatccaggaggagatggtggtcacggagcatgtcagtgacaaggaggccctggggtccttcatctaccacctgtgcaacgggaaagacacctaccggctccggcgccgggcaacgcggaggcggatcaacaagcgtggggccaagaactgcaatgccatccgccacttcgagaacaccttcgtggtggagacgctcatctgcggggtggtgtga

SEQ ID NO: 72 - DNA, 2841 bp, Homo sapiens
atggctgtgtactgctatgcgctcaatagcctggtgatcatgaatagcgccaacgagatgaagagcggcggcggcccggggcccagtggcagcgagacgcccccgcccccgaggagggcagtgctgagccccggcagcgttttcagccccgggagaggcgcctctttcctcttccccccagccgagtcgctgtcccccgaggagccccggagccccgggggctggcggagcggccggcgcaggctgaatagtagcagcggcagtggcagcggcagcagcggcagtagcgtgagcagcccaagttgggctggtcgcctgcgaggggaccggcagcaggtggtggcagccggtaccctctccccgccagggccggaggaggccaagaggaagctgcggatcttgcagcgcgagttgcagaacgtgcaggtgaaccagaaagtgggcatgtttgaggcgcacatccaggcacagagctccgccattcaagcgccccgcagcccgcgtttgggcagggctcgctcgccctccccgtgccccttccgcagcagcagtcagccccctggaagggtcctggttcagggcgcccggagcgaggaacggaggacaaagtcctggggggagcaatgtccagagacttcaggaaccgactccgggaggaaaggagggcccagcctatgctcctcgcaggtgaagaaaggaatgccacctcttcccggccgggctgcccctacaggatcagaggctcagggtccatccgcttttgtaaggatggagaagggtatccctgccagtccccgctgtggctcacccacagctatggaaattgacaaaaggggctctcctaccccgggaactcggagctgcctagctccctcattggggctgttcggagctagcttaacgatggccacggaagtggcagcgagagttacatccactgggccacaccgtccacaggatcttgccctcactgagccgtctgggagagcccgtgagcttgaggacctgcagcccccagaggccctggtggagaggcaggggcagtttctgggcagtgagacaagcccagccccagaaaggggcgggccccgcgatggagaaccccctgggaagatggggaaaggatatctgccctgtggcatgccgggctctggggagcctgaagtgggcaaaaggccagaggagacgactgtgagcgtgcaaagcgcagagtcctctgattccctgagctggtccaggctgcccagggccctggcctccgtaggccctgaggaggcccgaagtggggcccccgtgggcggggggcgttggcagctctccgacagagtggagggagggtccccaacgctgggcttgcttgggggcagcccctcagcacagccggggaccgggaatgtggaggcgggaattccttctggcagaatgctggagcctttgccctgttgggacgctgcgaaagatctgaaagaacctcagtgccctcctggggacagggtgggtgtgcagcctgggaactccagggtttggcagggcaccatggagaaagccggtttggcttggacgcgtggcacaggggtgcaatcagaggggacttgggaaagccagcggcaggacagtgatgccctcccaagtccggagctgctaccccaagatccggacaagcctttcctgaggaaggcctgcagccccagcaacatacctgctgtcatcattacagacatgggcacccaggaggatggggccttggaggagacgcagggaagccctcggggcaacctgcccctgaggaaactgtcctcttcctcggcctcctccacgggcttctcctcatcctacgaagactcagaggaggacatctccagtgaccctgagcgcaccctggaccccaactcagccttcctgcataccctggaccagcagaaacctagagtgagcaaatcatggaggaagataaaaaacatggtgcactggtctcccttcgtcatgtccttcaagaagaagtacccctggatccagctggcaggacacgcagggagtttcaaggcagctgccaatggcaggatcctgaagaagcactgtgagtcagagcagcgctgcctggaccggctgatggtggatgtgctgaggcccttcgtacctgcctaccatggggatgtggtgaaggacggggagcgctacaaccagatggacgacctgctggccgacttcgactcgccctgtgtgatggactgcaagatgggaatcaggacctacctggaggaggagctcacgaaggcccggaagaagcccagcctgcggaaggacatgtaccagaagatgatcgaggtggaccccgaggcccccaccgaggaggaaaaagcacagcgggctgtgaccaagccacggtacatgcagtggcgggagaccatcagctccacggccaccctggggttcaggatcgagggaatcaagaaagaagacggcaccgtgaaccgggacttcaagaagaccaaaacgagggagcaggtcaccgaggccttcagagagttcactaaaggaaaccataacatcctgatcgcctatcgggaccggctgaaggccattcgaaccactctagaagtttctcccttcttcaagtgccacgaggtcattggcagctccctcctcttcatccacgacaagaaggaacaggccaaagtgtggatgatcgactttgggaaaaccacgcccctgcctgagggccagaccctgcagcatgacgtcccctggcaggaggggaaccgggaggatggctacctctcggggctcaataacctcgtcgacatcctgaccgagatgtcccaggatgccccactcgcctga

SEQ ID NO: 73 - DNA, 5481 bp, Homo sapiens
atgggggactccaaagtgaaagtggcggtgcggatacgacccatgaaccggcgagagactgacttgcataccaaatgtgtggtggatgtggatgcaaacaaggttattcttaatcctgtaaatacgaatctttccaaaggagatgcccggggccagccgaaggtgtttgcttatgatcattgtttctggtctatggatgaatctgtcaaagaaaagtatgcaggtcaagatattgttttcaagtgccttggagagaatatcctgcagaatgcttttgatggctacaatgcatgtatctttgcctatggacagactggctctggaaaatcttataccatgatgggcacagctgaccaacctggattaatcccaagactttgcagtggactctttgaacgaactcagaaagaggaaaatgaagaacagagttttaaagtagaagtgtcctacatggaaatttataatgaaaaagttcgagaccttcttgatcccaaaggaagccgtcagacgttgaaagtcagagagcatagtgtgttgggaccttatgtcgacggactttctaaactggctgtcacaagctacaaggatattgagtcgttgatgtctgagggtaacaaatctcgcacagttgctgcaaccaacatgaacgaggagagtagccgatcccatgcagttttcaaaatcaccctcacacatactctctacgatgtgaagtctgggacatctggagagaaagtgggcaaactcagcctggtggatttagctggcagtgaacgagcaacgaagacaggcgctgcaggggacaggctgaaggaagggagcaacattaacaagtccctcacaaccctcggtctggttatctcagctcttgcagatcagagtgctggcaaaaacaagaataaatttgttccatatcgtgactcagttctcacttggctgctcaaagacagcctcgggggtaacagcaagaccgccatggtggctactgtgagtcctgcagctgataactatgatgaaaccctctcaactctgcggtatgcagatcgagccaagcacattgtaaaccacgctgtggtgaatgaggaccctaatgcccgaattatccgggatctccgggaagaagttgagaaactccgggagcagctgaccaaagcagaggcaatgaaatctccagagctaaaggaccggctggaagaatctgagaagctaatccaggaaatgactgtgacctgggaggagaaattaaggaaaacggaggagattgcacaggaacgacagaaacagcttgagagtcttggaatatctcttcagtcttcgggaatcaaagttggggatgataaatgcttccttgtgaatctgaatgctgacccagctctgaatgagcttctggtgtactatttaaaggaacatacattgatagggtcagcaaattcccaagatatccaactgtgcggcatgggaattcttcctgaacactgtattatagacatcacgtcagaaggccaggttatgctgactcctcagaagaacaccagaacatttgtaaatgggtcatctgtctccagtccaatacagctacaccatggggacaggatattatggggaaacaatcatttcttcagactcaatttgcctaaaaagaaaaagaaagcagaacgagaggatgaggaccaggatccctccatgaagaacgagaatagttctgagcagctggatgtagacggagactcctccagcgaggtgtccagtgaagttaactttaattacgaatacgcacagatggaggtcaccatgaaggccctgggcagcaatgatccgatgcagtccatattaaacagcttagaacaacagcatgaagaagaaaaacgatctgcactggagcgccagaggcttatgtatgagcacgaattggagcagctccggagaaggctgtctcctgagaagcagaactgccggagcatggacaggttttctttccactcgcccagcgctcagcaacgcttaagacagtgggctgaggagagagaagcaacgttgaataacagcctgatgaggctgagggaacaaattgttaaggccaatctattggtgagagaagctaattacattgctgaggagctggataaaagaacagaatacaaagttaccctacagattccagcctccagcctggatgccaacaggaagcgaggctctcttcttagtgagcctgcaatccaggtgagaagaaaaggaaaaggaaagcagatttggtctttggaaaaactggacaacaggctgttggatatgagagacctttatcaggagtggaaagagtgtgaagaagataacccagtaatacgatcatacttcaaacgtgctgatccattctatgatgagcaggaaaatcacagtctcattggggtggccaatgtcttcctcgagtcacttttctatgatgtgaagttacaatacgctgttcccatcatcaaccagaaaggagaggtggcaggtcggctgcacgtggaggtgatgcgactcagtggtgatgttggggagaggatcgcaggaggcgatgaggtggcagaggtctcctttgagaaggagacccaggagaacaaactggtgtgcatggttaaaatcctgcaagctactgggttgccacagcatctgtcccactttgtgttctgcaaatacagcttctgggatcaacaggagccggtgattgtcgctcctgaagtggacacctcctcctcttccgtcagcaaggagccgcactgcatggttgtctttgatcattgcaatgagttttctgttaacatcaccgaagactttatcgagcatctttccgaaggagcattggcaattgaagtatatggacataaaataaacgatccccggaaaaaccccgccctgtgggatttgggaatcatccaagcaaagacacgtagtcttcgggacagatggagtgaagtgaccaggaaattggaattctgggttcaaatcttggaacagaatgagaatggtgaatactgccctgtagaagtgatttctgcaaaggatgtcccaacaggaggaatcttccagctccggcaggggcagtcccggagagttcaagtcgaagtgaagtcagtgcaggaatctgggactttaccactgatggaagaatgtatactgtctgttggcattggatgtgtcaaagttagaccgctcagagcccccagaacacatgagaccttccatgaggaagaggaagacatggacagctaccaggatcgagatttagagagacttcgtagaaaatggctaaatgcattaacaaaacgtcaggagtacttggatcaacaattgcaaaagcttgtcagtaaacgtgataaaacagaggatgatgctgaccgtgaagcgcagcttctggagatgcggttgaccctaactgaggagaggaacgcggtgatggtcccctctgctggcagtggtattccaggggccccagcagaatggaccccagtacctgggatggagacacacattcctgttatattcctggacttaaatgctgatgatttcagctctcaggataatcttgatgacccagaagctggtggatgggatgcgaccttgactggggaagaagaagaggagttctttgaattgcagattgtgaagcagcatgatggggaggtgaaagcagaagcctcctgggactccgcggtgcatggctgccctcagctcagcaggggcacgcccgtggacgagcggttgttcctgatcgtgcgcgtgacggtccagctcagccaccctgctgacatgcaactggtgttacgcaagagaatctgtgtcaatgttcacggccgccagggttttgcacagagtctcctaaaaaagatgtctcatcgaagttctattcctggctgtggagtgacttttgaaattgtctccaatattccagaggatgcccagggagtggaagaacgggaagcattagcaagaatggcagccaatgttgaaaacccagcttctgctgactcggaggcttatattgaaaagtacctcaggagcgtgctggctgtagaaaacctcctgactttagatcgtctgcgccaggaagttgcagtgaaggaacagttaacaggaaaaggaaagttgagcaggaggagtatcagttctccaaatgtgaacagattgtctggaagccgacaagatctcattccatcatacagtctaggcagcaacaagggccggtgggaaagtcagcaggatgtatcccaaaccacagtttccagaggaatagctcctgcccccgccctctctgtttctccccaaaataaccattctccagatccaggactcagtaaccttgcagcatcctacttgaatcctgtcaaatccttcgtgccgcaaatgccaaagctcctcaagtctctctttcccgtccgcgatgagaagaggggcaagcggccgtctcccctcgcacaccagcccgtgccccgcatcatggtgcagtcagccagcccggacatcagggtgaccaggatggaggaggctcagccggagatgggccctgacgtgctggtgcagacgatgggggccccggccttgaagatctgcgacaaacctgccaaagtgccttccccaccgcctgtcatagctgtcacagcggtcaccccggctccggaggcacaggacgggccccccagccccctgagtgaagcctctagcgggtacttctcccacagcgtctccaccgcgaccctgtcggacgccctgggccccggcctggacgctgcggccccgccggggtccatgcccaccgcccctgaggccgagcccgaggcgcccatcagccaccccccaccgcccacggccgtccccgccgaggagccccctggcccccagcagctcgtgagccccggtcgggagcgccccgacctcgaggccccggcgcccggctccccgttccgcgtccggagggtgcgggcctcggagttgcgctccttctcgcgcatgctggctggggaccccggctgctccccgggggccgaggggaatgcgccggccccgggcgccgggggacaggccctggcctctgattccgaggaagctgacgaggtcccggagtggctccgagagggcgagttcgtcaccgtgggcgcccacaaaacgggcgtggtgagatacgtggggcctgccgacttccaagagggcacgtgggtcggcgtggagctcgacctgccctcaggtaagaatgacggttccatcggcgggaagcagtacttcaggtgtaaccctggctacgggctgctggtcaggcccagccgggtccgcagggccacgggccctgtgcggcggcgcagcacaggactccggctgggtgcccccgaggcccgccggagcgccaccctctcgggctccgccaccaacctggcctcgctgacagctgccctggccaaggccgacaggagccacaagaaccctgagaaccggaaatcctgggccagctga

SEQ ID NO: 74 - DNA, 2631 bp, Homo sapiens
atggagctgatcaccattctcgagaagaccgtgtctcccgatcggctggagctggaagcggcgcagaagttcctggagcgtgcggccgtggagaacctgcccactttccttgtggaactgtccagagtgctggcaaatccaggaaacagtcaggttgccagagttgcagctggtctacaaatcaagaactctttgacatctaaagatccagatatcaaggcacaatatcagcagaggtggcttgctattgatgctaatgctcgacgagaagtcaagaactatgttttgcagacattgggtacagaaacttaccggcctagttctgcctcacagtgtgtggctggtattgcttgtgcagagatcccagtaaaccagtggccagaactcattcctcagctggtggccaatgtcacaaaccccaacagcacagagcacatgaaggagtcgacattggaagccatcggttatatttgccaagatatagacccagagcagctacaagataaatccaatgagattctgactgccataatccaggggatgaggaaagaagagcctagtaataatgtgaagctagctgctacgaatgcactcctgaactcattggagttcaccaaagcaaactttgataaagagtctgaaaggcactttattatgcaggtggtctgtgaagccacacagtgtccagatacgagggtacgagtggctgctttacagaatctggtgaagataatgtccttatattatcagtacatggagacatatatgggtcctgctctttttgcaatcacaatcgaagcaatgaaaagtgacattgatgaggtggctttacaagggatagaattctggtccaatgtctgtgatgaggaaatggatttggccattgaagcttcagaggcagcagaacaaggacggccccctgagcacaccagcaagttttatgcgaagggagcactacagtatctggttccaatcctcacacagacactaactaaacaggacgaaaatgatgatgacgatgactggaacccctgcaaagcagcaggggtgtgcctcatgcttctggccacctgctgtgaagatgacattgtcccacatgtcctccccttcattaaagaacacatcaagaacccagattggcggtaccgggatgcagcagtgatggcttttggttgtatcttggaaggaccagagcccagtcagctcaaaccactagttatacaggctatgcccaccctaatagaattaatgaaagaccccagtgtagttgttcgagatacagctgcatggactgtaggcagaatttgtgagctgcttcctgaagctgccatcaatgatgtctacttggctcccctgctacagtgtctgattgagggtctcagtgctgaacccagagtggcttcaaatgtgtgctgggctttctccagtctggctgaagctgcttatgaagctgcagacgttgctgatgatcaggaagaaccagctacttactgcttatcttcttcatttgaactcatagttcagaagctcctagagactacagacagacctgatggacaccagaacaacctgaggagttctgcatatgaatctctgatggaaattgtgaaaaacagtgccaaggattgttatcctgctgtccagaaaacgactttggtcatcatggaacgactgcaacaggttcttcagatggagtcacatatccagagcacatccgatagaatccagttcaatgaccttcagtctttactctgtgcaactcttcagaatgttcttcggaaagtgcaacatcaagatgctttgcagatctctgatgtggttatggcctccctgttaaggatgttccaaagcacagctgggtctgggggagtacaagaggatgccctgatggcagttagcacactggtggaagtgttgggtggtgaattcctcaagtacatggaggcctttaaacccttcctgggcattggattaaaaaattatgctgaataccaggtttgtttggcagctgtgggcttagtgggagacttgtgccgtgccctgcaatccaacatcatacctttctgtgacgaggtgatgcagctgcttctggaaaatttggggaatgagaacgtccacaggtctgtgaagccgcagattctgtcagtgtttggtgatattgcccttgctattggaggagagtttaaaaaatacttagaggttgtattgaatactcttcagcaggcctcccaagcccaggtggacaagtcagactatgacatggtggattatctgaatgagctaagggaaagctgcttggaagcctatactggaatcgtccagggattaaagggggatcaggagaacgtacacccggatgtgatgctggtacaacccagagtagaatttattctgtctttcattgaccacattgctggagatgaggatcacacagatggagtagtagcttgtgctgctggactaataggggacttatgtacagcatttgggaaggatgtactgaaattagtagaagctaggccaatgatccatgaattgttaactgaagggcggagatcgaagactaacaaagcaaaaacccttgctacatgggcaacaaaagaactgaggaaactgaagaaccaagcttga

SEQ ID NO: 75 - DNA, 11088 bp, Homo sapiens
atggcgaagcggctctgcgcggggagcgcactgtgtgttcgcggcccccggggccccgcgccgctgctgctggtcgggctggcgctgctgggcgcggcgcgggcgcgggaggaggcgggcggcggcttcagcctgcacccgccctacttcaacctggccgagggcgcccgcatcgccgcctccgcgacctgcggagaggaggccccggcgcgcggctccccgcgccccaccgaggacctttactgcaagctggtagggggccccgtggccggcggcgaccccaaccagaccatccggggccagtactgtgacatctgcacggctgccaacagcaacaaggcacaccccgcgagcaatgccatcgatggcacggagcgctggtggcagagtccaccgctgtcccgcggcctggagtacaacgaggtcaacgtcaccctggacctgggccaggtcttccacgtggcctacgtcctcatcaagtttgccaactcaccccggccggacctctgggtgctggagcggtccatggacttcggccgcacctaccagccctggcagttctttgcctcctccaagagggactgtctggagcggttcgggccacagacgctggagcgcatcacacgggacgacgcggccatctgcaccaccgagtactcacgcatcgtgcccctggagaacggagagatcgtggtgtccctggtgaacggacgtccgggcgccatgaatttctcctactcgccgctgctacgtgagttcaccaaggccaccaacgtccgcctgcgcttcctgcgtaccaacacgctgctgggccatctcatggggaaggcgctgcgggaccccacggtcacccgccggtattattacagcatcaaggatatcagcatcggaggccgctgtgtctgccacggccacgcggatgcctgcgatgccaaagaccccacggacccgttcaggctgcagtgcacctgccagcacaacacctgcgggggcacctgcgaccgctgctgccccggcttcaatcagcagccgtggaagcctgcgactgccaacagtgccaacgagtgccagtcctgtaactgctacggccatgccaccgactgttactacgaccctgaggtggaccggcgccgcgccagccagagcctggatggcacctatcagggtgggggtgtctgtatcgactgccagcaccacaccaccggcgtcaactgtgagcgctgcctgcccggcttctaccgctctcccaaccaccctctcgactcgccccacgtctgccgccgctgcaactgcgagtccgacttcacggatggcacctgcgaggacctgacgggtcgatgctactgccggcccaacttctctggggagcggtgtgacgtgtgtgccgagggcttcacgggcttcccaagctgctacccgacgccctcgtcctccaatgacaccagggagcaggtgctgccagccggccagattgtgaattgtgactgcagcgcggcagggacccagggcaacgcctgccggaaggacccaagggtgggacgctgtctgtgcaaacccaacttccaaggcacccattgtgagctctgcgcgccagggttctacggccccggctgccagccctgccagtgttccagccctggagtggccgatgaccgctgtgaccctgacacaggccagtgcaggtgccgagtgggcttcgagggggccacatgtgatcgctgtgcccccggctactttcacttccctctctgccagttgtgtggctgcagccctgcaggaaccttgcccgagggctgcgatgaggccggccgctgcctatgccagcctgagtttgctggacctcattgtgaccggtgccgccctggctaccatggtttccccaactgccaagcatgcacctgcgaccctcggggagccctggaccagctctgtggggcgggaggtttgtgccgctgccgccccggctacacaggcactgcctgccaggaatgcagccccggctttcacggcttccccagctgtgtcccctgccactgctctgctgaaggctccctgcacgcagcctgtgacccccggagtgggcagtgcagctgccggccccgtgtgacggggctgcggtgtgacacatgtgtgcccggtgcctacaacttcccctactgcgaagctggctcttgccaccctgccggtctggccccagtggatcctgcccttcctgaggcacaggttccctgtatgtgccgggctcacgtggaggggccgagctgtgaccgctgcaaacctgggttctggggactgagccccagcaaccccgagggctgtacccgctgcagctgcgacctcaggggcacactgggtggagttgctgagtgccagccgggcaccggccagtgcttctgcaagccccacgtgtgcggccaggcctgcgcgtcctgcaaggatggcttctttggactggatcaggctgactattttggctgccgcagctgccggtgtgacattggcggtgcactgggccagagctgtgaaccgaggacgggcgtctgccggtgccgccccaacacccagggccccacctgcagcgagcctgcgagggaccactacctcccggacctgcaccacctgcgcctggagctggaggaggctgccacacctgagggtcacgccgtgcgctttggcttcaaccccctcgagttcgagaacttcagctggaggggctacgcgcagatggcacctgtccagcccaggatcgtggccaggctgaacctgacctcccctgaccttttctggctcgtcttccgatacgtcaaccggggggccatgagtgtgagcgggcgggtctctgtgcgagaggagggcaggtcggccacctgcgccaactgcacagcacagagtcagcccgtggccttcccacccagcacggagcctgccttcatcaccgtgccccagaggggcttcggagagccctttgtgctgaaccctggcacctgggccctgcgtgtggaggccgaaggggtgctcctggactacgtggttctgctgcctagcgcatactacgaggcggcgctcctgcagctgcgggtgactgaggcctgcacataccgtccctctgcccagcagtctggcgacaactgcctcctctacacacacctccccctggatggcttcccctcggccgccgggctggaggccctgtgtcgccaggacaacagcctgccccggccctgccccacggagcagctcagcccgtcgcacccgccactgatcacctgcacgggcagtgatgtggacgtccagcttcaagtggcagtgccacagccaggccgctatgccctagtggtggagtacgccaatgaggatgcccgccaggaggtgggcgtggccgtgcacaccccacagcgggccccccagcaggggctgctctccctgcacccctgcctgtacagcaccctgtgccggggcactgcccgggatacccaggaccacctggctgtcttccacctggactcggaggccagcgtgaggctcacagccgaacaggcacgcttcttcctgcacggggtcactctggtgcccattgaggagttcagcccggagttcgtggagccccgggtcagctgcatcagcagccacggcgcctttggccccaacagtgccgcctgtctgccctcgcgcttcccaaagccgccccagcccatcatcctcagggactgccaggtgatcccgctgccgcccggcctcccgctgacccacgcgcaggatctcactccagccatgtccccagctggaccccgacctcggccccccaccgctgtggaccctgatgcagagcccaccctgctgcgtgagccccaggccaccgtggtcttcaccacccatgtgcccacgctgggccgctatgccttcctgctgcacggctaccagccagcccaccccaccttccccgtggaagtcctcatcaacgccggccgcgtgtggcagggccacgccaacgccagcttctgtccacatggctacggctgccgcaccctggtggtgtgtgagggccaggccctgctggacgtgacccacagcgagctcactgtgaccgtgcgtgtgcccaagggccggtggctctggctggattatgtactcgtggtccctgagaacgtctacagctttggctacctccgggaggagcccctggataaatcctatgacttcatcagccactgcgcagcccagggctaccacatcagccccagcagctcatccctgttctgccgaaacgctgctgcttccctctccctcttctataacaacggagcccgtccatgtggctgccacgaagtaggtgctacaggccccacgtgtgagcccttcgggggccagtgtccctgccatgcccatgtcattggccgtgactgctcccgctgtgccaccggatactggggcttccccaactgcaggccctgtgactgcggtgcccgcctctgtgacgagctcacgggccagtgcatctgcccgccacgcaccatcccgcccgactgcctgctgtgccagccccagacctttggctgccaccccctggtcggctgtgaggagtgtaactgctcagggcccggcatccaggagctcacagaccctacctgtgacacagacagcggccagtgcaagtgcagacccaacgtgactgggcgccgctgtgatacctgctctccgggcttccatggctacccccgctgccgcccctgtgactgtcacgaggcgggcactgcgcctggcgtgtgtgaccccctcacagggcagtgctactgtaaggagaacgtgcagggccccaaatgtgaccagtgcagccttgggaccttctcactggatgctgccaaccccaaaggttgcacccgctgcttctgctttggggccacggagcgctgccggagctcgtcctacacccgccaggagttcgtggatatggagggatgggtgctgctgagcactgaccggcaggtggtgccccacgagcggcagccagggacggagatgctccgtgcagacctgcggcacgtgcctgaggctgtgcccgaggctttccccgagctgtactggcaggccccaccctcctacctgggggaccgggtgtcatcctacggtgggaccctccgttatgaactgcactcagagacccagcggggagatgtctttgtccccatggagagcaggccggatgtggtgctgcagggcaaccagatgagcatcacattcctggagccggcataccccacgcctggccacgttcaccgtgggcagctgcagctggtggaggggaacttccggcatacggagacgcgcaacactgtgtcccgcgaggagctcatgatggtgctggccagcctggagcagctgcagatccgtgccctcttctcacagatctcctcggctgtcttcctgcgcagggtggcactggaggtggccagcccagcaggccagggggccctggccagcaatgtggagctgtgcctgtgccccgccagctaccggggggactcatgccaggaatgtgcccccggcttctatcgggacgtcaaaggtctcttcctgggccgatgtgtcccttgtcagtgccatggacactcagaccgctgcctccctggctctggcgtctgtgtggactgccagcacaacaccgaaggggcccactgtgagcgctgccaggctggcttcgtgagcagcagggacgaccccagcgccccctgtgtcagctgcccctgccccctctcagtgccttccaacaacttcgccgagggctgtgtcctgcgaggcggccgcacccagtgcctctgcaaacctggttatgcaggtgcctcctgcgagcggtgtgcgcccggattctttgggaacccactggtgctgggcagctcctgccagccatgcgactgcagcggcaacggtgaccccaacttgctcttcagcgactgcgaccccctgacgggcgcctgccgtggctgcctgcgccacaccactgggccccgctgcgagatctgtgcccccggcttctacggcaacgccctgctgcccggcaactgcacccggtgcgactgtaccccatgtgggacagaggcctgcgacccccacagcgggcactgcctgtgcaaggcgggcgtgactgggcggcgctgtgaccgctgccaggagggacattttggtttcgatggctgcgggggctgccgcccgtgtgcttgtggaccggccgccgagggctccgagtgccacccccagagcggacagtgccactgccgaccagggaccatgggaccccagtgccgcgagtgtgcccctggctactgggggctccctgagcagggctgcaggcgctgccagtgccctgggggccgctgtgaccctcacacgggccgctgcaactgccccccggggctcagcggggagcgctgcgacacctgcagccagcagcatcaggtgcctgttccaggcgggcctgtgggccacagcatccactgtgaagtgtgtgaccactgtgtggtcctgctcctggatgacctggaacgggccggcgccctcctccccgccattcacgagcaactgcgtggcatcaatgccagctccatggcctgggcccgtctgcacaggctgaacgcctccatcgctgacctgcagagccagctccggagccccctgggcccccgccatgagacggcacagcagctggaggtgctggagcagcagagcacaagcctcgggcaggacgcacggcggctaggcggccaggccgtggggacccgagaccaggcgagccaattgctggccggcaccgaggccacactgggccatgcgaagacgctgttggcggccatccgggctgtggaccgcaccctgagcgagctcatgtcccagacgggccacctggggctggccaatgcctcggctccatcaggtgagcagctgctccggacactggccgaggtggagcggctgctctgggagatgcgggcccgggacctgggggccccgcaggcagcagctgaggctgagttggctgcagcacagagattgctggcccgggtgcaggagcagctgagcagcctctgggaggagaaccaggcactggccacacaaacccgcgaccggctggcccagcacgaggccggcctcatggacctgcgagaggctttgaaccgggcagtggacgccacacgggaggcccaggagctcaacagccgcaaccaggagcgcctggaggaagccctgcaaaggaagcaggagctgtcccgggacaatgccaccctgcaggccactctgcatgcggctagggacaccctggccagcgtcttcagattgctgcacagcctggaccaggctaaggaggagctggagcgcctcgccgccagcctggatggggctcggaccccactgctgcagaggatgcagaccttctccccggcgggcagcaagctgcgtctagtggaggccgccgaggcccacgcacagcagctgggccagctggcactcaatctgtccagcatcatcctggacgtcaaccaggaccgcctcacccagagggccatcgaggcctccaacgcctacagccgcatcctgcaggccgtgcaggctgccgaggatgctgctggccaggccctgcagcaggcggaccacacgtgggcgacggtggtgcggcagggcctggtggaccgagcccagcagctcctggccaacagcactgcactagaagaggccatgctccaggaacagcagaggctgggccttgtgtgggctgccctccagggtgccaggacccagctccgagatgtccgggccaagaaggaccagctggaggcgcacatccaggcggcgcaggccatgcttgccatggacacagacgagacaagcaagaagatcgcacatgccaaggctgtggctgctgaagcccaggacaccgccacccgtgtgcagtcccagctgcaggccatgcaggagaatgtggagcggtggcagggccagtacgagggcctgcggggccaggacctgggccaggcagtgcttgacgcaggccactcagtgtccaccctggagaagacgctgccccagctgctggccaagctgagcatcctggagaaccgtggggtgcacaacgccagcctggccctgtccgccagcattggccgcgtgcgagagctcattgcccaggcccggggggctgccagtaaggtcaaggtgcccatgaagttcaacgggcgctcaggggtgcagctgcgcaccccacgggatcttgccgaccttgctgcctacactgccctcaagttctacctgcagggcccagagcctgagcctgggcagggtaccgaggatcgctttgtgatgtacatgggcagccgccaggccactggggactacatgggtgtgtctctgcgtgacaagaaggtgcactgggtgtatcagctgggtgaggcgggccctgcagtcctaagcatcgatgaggacattggggagcagttcgcagctgtcagcctggacaggactctccagtttggccacatgtccgtcacagtggagagacagatgatccaggaaaccaagggtgacacggtggcccctggggcagaggggctgctcaacctgcggccagacgacttcgtcttctacgtcggggggtaccccagtaccttcacgccccctcccctgcttcgcttccccggctaccggggctgcatcgagatggacacgctgaatgaggaggtggtcagcctctacaacttcgagaggaccttccagctggacacggctgtggacaggccttgtgcccgctccaagtcgaccggggacccgtggctcacggacggctcctacctggacggcaccggcttcgcccgcatcagcttcgacagtcagatcagcaccaccaagcgcttcgagcaggagctgcggctcgtgtcctacagcggggtgctcttcttcctgaagcagcagagccagttcctgtgcttggccgtgcaagaaggcagcctcgtgctgttgtatgactttggggctggcctgaaaaaggccgtcccactgcagcccccaccgcccctgacctcggccagcaaggcgatccaggtgttcctgctggggggcagccgcaagcgtgtgctggtgcgtgtggagcgggccacggtgtacagcgtggagcaggacaatgatctggagctggccgacgcctactacctggggggcgtgccgcccgaccagctgcccccgagcctgcgacggctcttccccaccggaggctcagtccgtggctgcgtcaaaggcatcaaggccctgggcaagtatgtggacctcaagcggctgaacacgacaggcgtgagcgccggctgcaccgccgacctgctggtggggcgcgccatgactttccatggccacggcttccttcgcctggcgctctcgaacgtggcaccgctcactggcaacgtctactccggcttcggcttccacagcgcccaggacagtgccctgctctactaccgggcgtccccggatgggctatgccaggtgtccctgcagcagggccgtgtgagcctacagctcctgaggactgaagtgaaaactcaagcgggcttcgccgatggtgccccccattacgtcgccttctacagcaatgccacgggagtctggctgtatgtcgatgaccagctccagcagatgaagccccaccggggaccaccccccgagctccagccgcagcctgaggggcccccgaggctcctcctgggaggcctgcctgagtctggcaccatttacaacttcagtggctgcatcagcaacgtcttcgtgcagcggctcctgggcccacagcgcgtatttgatctgcagcagaacctgggcagcgtcaatgtgagcacgggctgtgcacccgccctgcaagcccagaccccgggcctggggcctagaggactgcaggccaccgcccggaaggcctcccgccgcagccgtcagcccgcccggcatcctgcctgcatgctgcccccacacctcaggaccacccgagactcctaccagtttgggggttccctgtccagtcacctggagtttgtgggcatcctggcccgacataggaactggcccagtctctccatgcacgtcctcccgcgaagctcccgaggcctcctcctcttcactgcccgtctgaggcccggcagcccctccctggcgctcttcctgagcaatggccacttcgttgcacagatggaaggcctcgggactcggctccgcgcccagagccgccagcgctcccggcctggccgctggcacaaggtctccgtgcgctgggagaagaaccggatcctgctggtgacggacggggcccgggcctggagccaggaggggccgcaccggcagcaccagggggcagagcacccccagccccacaccctctttgtgggcggcctcccggccagcagccacagctccaaacttccggtgaccgtcgggttcagcggctgtgtgaagagactgaggctgcacgggaggcccctgggggcccccacacggatggcaggggtcacaccctgcatcttgggccccctggaggcgggcctgttcttcccaggcagcgggggagttatcactttagacctcccaggagctacactgcctgatgtgggcctggaactggaggtgcggcccctggcagtcaccggactgatcttccacttgggccaggcccggacgcccccctacttgcagttgcaggtgaccgagaagcaagtcctgctgcgggcggatgacggagcaggggagttctccacgtcagtgacccgcccctcagtgctgtgtgatggccagtggcaccggctagcggtgatgaaaagcgggaatgtgctccggctggaggtggacgcgcagagcaaccacaccgtgggccccttgctggcggctgcagctggtgccccagcccctctgtacctcgggggcctgcctgagcccatggccgtgcagccctggccccccgcctactgcggctgcatgaggaggctggcggtgaaccggtcccccgtcgccatgactcgctctgtggaggtccacggggcagtgggggccagtggctgcccagccgcctag

SEQ ID NO: 76 - DNA, 318 bp, Homo sapiens
atgtctatatatttccccattcactgccccgactatctgagatcggccaagatgactgaggtgatgatgaacacccagcccatggaggagatcggcctcagcccccgcaaggatggcctttcctaccagatcttcccagacccgtcagattttgaccgctgctgcaaactgaaggaccgtctgccctccatagtggtggaacccacagaaggggaggtggagagcggggagctccggtggccccctgaggagttcctggtccaggaggatgagcaagataactgcgaagagacagcgaaagaaaataaagagcagtag

SEQ ID NO: 77 - DNA, 2583 bp, Homo sapiens
atggggccctggggctggaaattgcgctggaccgtcgccttgctcctcgccgcggcggggactgcagtgggcgacagatgcgaaagaaacgagttccagtgccaagacgggaaatgcatctcctacaagtgggtctgcgatggcagcgctgagtgccaggatggctctgatgagtcccaggagacgtgcttgtctgtcacctgcaaatccggggacttcagctgtgggggccgtgtcaaccgctgcattcctcagttctggaggtgcgatggccaagtggactgcgacaacggctcagacgagcaaggctgtccccccaagacgtgctcccaggacgagtttcgctgccacgatgggaagtgcatctctcggcagttcgtctgtgactcagaccgggactgcttggacggctcagacgaggcctcctgcccggtgctcacctgtggtcccgccagcttccagtgcaacagctccacctgcatcccccagctgtgggcctgcgacaacgaccccgactgcgaagatggctcggatgagtggccgcagcgctgtaggggtctttacgtgttccaaggggacagtagcccctgctcggccttcgagttccactgcctaagtggcgagtgcatccactccagctggcgctgtgatggtggccccgactgcaaggacaaatctgacgaggaaaactgcgctgtggccacctgtcgccctgacgaattccagtgctctgatggaaactgcatccatggcagccggcagtgtgaccgggaatatgactgcaaggacatgagcgatgaagttggctgcgttaatgtgacactctgcgagggacccaacaagttcaagtgtcacagcggcgaatgcatcaccctggacaaagtctgcaacatggctagagactgccgggactggtcagatgaacccatcaaagagtgcgggaccaacgaatgcttggacaacaacggcggctgttcccacgtctgcaatgaccttaagatcggctacgagtgcctgtgccccgacggcttccagctggtggcccagcgaagatgcgaagatatcgatgagtgtcaggatcccgacacctgcagccagctctgcgtgaacctggagggtggctacaagtgccagtgtgaggaaggcttccagctggacccccacacgaaggcctgcaaggctgtgggctccatcgcctacctcttcttcaccaaccggcacgaggtcaggaagatgacgctggaccggagcgagtacaccagcctcatccccaacctgaggaacgtggtcgctctggacacggaggtggccagcaatagaatctactggtctgacctgtcccagagaatgatctgcagcacccagcttgacagagcccacggcgtctcttcctatgacaccgtcatcagcagagacatccaggcccccgacgggctggctgtggactggatccacagcaacatctactggaccgactctgtcctgggcactgtctctgttgcggataccaagggcgtgaagaggaaaacgttattcagggagaacggctccaagccaagggccatcgtggtggatcctgttcatggcttcatgtactggactgactggggaactcccgccaagatcaagaaagggggcctgaatggtgtggacatctactcgctggtgactgaaaacattcagtggcccaatggcatcaccctagatctcctcagtggccgcctctactgggttgactccaaacttcactccatctcaagcatcgatgtcaacgggggcaaccggaagaccatcttggaggatgaaaagaggctggcccaccccttctccttggccgtctttgaggacaaagtattttggacagatatcatcaacgaagccattttcagtgccaaccgcctcacaggttccgatgtcaacttgttggctgaaaacctactgtccccagaggatatggttctcttccacaacctcacccagccaagaggagtgaactggtgtgagaggaccaccctgagcaatggcggctgccagtatctgtgcctccctgccccgcagatcaacccccactcgcccaagtttacctgcgcctgcccggacggcatgctgctggccagggacatgaggagctgcctcacagaggctgaggctgcagtggccacccaggagacatccaccgtcaggctaaaggtcagctccacagccgtaaggacacagcacacaaccacccgacctgttcccgacacctcccggctgcctggggccacccctgggctcaccacggtggagatagtgacaatgtctcaccaagctctgggcgacgttgctggcagaggaaatgagaagaagcccagtagcgtgagggctctgtccattgtcctccccatcgtgctcctcgtcttcctttgcctgggggtcttccttctatggaagaactggcggcttaagaacatcaacagcatcaactttgacaaccccgtctatcagaagaccacagaggatgaggtccacatttgccacaaccaggacggctacagctacccctcgagacagatggtcagtctggaggatgacgtggcgtga

SEQ ID NO: 78 - DNA, 927 bp, Homo sapiens
atggacgcgctcaagtcggcggggcgggcgctgatccggagccccagcttggccaagcagagctgggggggcggtggccggcaccgcaagctgcctgagaactggacagacacgcgggagacgctgctggaggggatgctgttcagcctcaagtacctgggcatgacgctagtggagcagcccaagggtgaggagctgtcggccgccgccatcaagaggatcgtggctacagctaaggccagtgggaagaagctgcagaaggtgactctgaaggtgtcgccacggggaattatcctgacagacaacctcaccaaccagctcattgagaacgtgtccatatacaggatctcctattgcacagcagacaagatgcacgacaaggtgtttgcatacatcgcccagagccagcacaaccagagcctcgagtgccacgccttcctctgcaccaagcggaagatggcacaggctgttaccctcaccgtagcccaggccttcaaagtcgcctttgagttttggcaggtgtccaaggaagagaaagagaagagggacaaagccagccaagagggaggggacgtcctgggggcccgccaagactgcaccccctccttgaagagcttggtcgccactgggaacctgctggacttagaggagacagctaaggccccgctgtccacggtcagcgccaacaccaccaacatggacgaggtgccgcggccacaagccttgagtggcagcagtgttgtctgggagctggatgatggcctggatgaagcgttttcgaggcttgcccagtctcggacaaaccctcaggtcctggacactggcctgacagcccaggacatgcattacgcccagtgcctctcgcctgtcgactgggacaagcctgacagcagcggcacagagcaggatgacctcttcagcttctga

SEQ ID NO: 79 - DNA, 1200 bp, Homo sapiens
atgccccaactctccggaggaggtggcggcggcgggggggacccggaactctgcgccacggacgagatgatccccttcaaggacgagggcgatcctcagaaggaaaagatcttcgccgagatcagtcatcccgaagaggaaggcgatttagctgacatcaagtcttccttggtgaacgagtctgaaatcatcccggccagcaacggacacgaggtggccagacaagcacaaacctctcaggagccctaccacgacaaggccagagaacaccccgatgacggaaagcatccagatggaggcctctacaacaagggaccctcctactcgagttattccgggtacataatgatgccaaatatgaataacgacccatacatgtcaaatggatctctttctccacccatcccgagaacatcaaataaagtgcccgtggtgcagccatcccatgcggtccatcctctcacccccctcatcacttacagtgacgagcacttttctccaggatcacacccgtcacacatcccatcagatgtcaactccaaacaaggcatgtccagacatcctccagctcctgatatccctactttttatcccttgtctccgggtggtgttggacagatcaccccacctcttggctggcaaggtcagcctgtatatcccatcacgggtggattcaggcaaccctacccatcctcactgtcagtcgacacttccatgtccaggttttcccatcatatgattcccggtcctcctggtccccacacaactggcatccctcatccagctattgtaacacctcaggtcaaacaggaacatccccacactgacagtgacctaatgcacgtgaagcctcagcatgaacagagaaaggagcaggagccaaaaagacctcacattaagaagcctctgaatgcttttatgttatacatgaaagaaatgagagcgaatgtcgttgctgagtgtactctaaaagaaagtgcagctatcaaccagattcttggcagaaggtggcatgccctctcccgtgaagagcaggctaaatattatgaattagcacggaaagaaagacagctacatatgcagctttatccaggctggtctgcaagagacaattatggtaagaaaaagaagaggaagagagagaaactacaggaatctgcatcaggtacaggtccaagaatgacagctgcctacatctga

SEQ ID NO: 80 - DNA, 1500 bp, Homo sapiens
atgaatgatgacccaagtatggaagagaatggtgttgaacgcgtgtgtcctgagagcctgctgcagtccagggaatattcctcactaccattacccagacacacttcatcgacagacggtactataacttcaagtgatcctggattagaaattctgaatatggcttcttgtgaccttgacagaaactcgctctgtaagaaagaggaggatacaagatcagcttctcccacgatagaggcccaaggcacaagtccagctcatgataatattgcattccaagactctacgagtaaggataaaaccatattaaatctggaagccaaagaggaaccagaaacaatagaagaacataaaaaagaacatgcttcaggagactctgtggtttcccctcttcctgtaaccactgtgaaatcggttaaccttagacaaagtgagaacacttctgctaatgagaaggaggtggaggcagaatttctcagattatctttgggatttaagtgtgactggtttaccttggagaagagagtgaagcttgaagagaggtcccgtgacttggcagaagaaaatttgaagaaagaaatcactaactgtttaaaactattagagtctttaacacctctgtgtgaagatgacaaccaggcacaggaaatcattaagaagctggagaagagtataaagtttcttagccagtgtgcagcacgagtggccagtagggctgagatgttgggagccatcaatcaggaaagccgggttagtaaagcagttgaagtgatgattcagcacgtagaaaacttgaagaggatgtatgccaaagagcacgctgaattagaagaactgaaacaggttcttctgcagaatgaaaggtctttcaatcctcttgaagatgatgatgactgccaaattaaaaaacgttcagcttctctaaactccaagccatcttctctacgaagagtgactattgcctctttacccagaaatattggaaatgcaggaatggtggctgggatggaaaataatgatcgattcagtagaaggtcaagcagttggcgtattttggggtcaaagcagagtgaacaccgtccctcattacctcgatttattagcacctattcctgggcagatgctgaagaagaaaaatgtgaactaaaaactaaagatgactcagagccatctggagaagaaacagtagaaaggacaaggaagccaagtctttctgaaaagaaaaataatccatcaaagtgggatgtctcttcagtttatgacacaatagcttcctgggcaacaaatctcaagtcctccatcagaaaggctaataaggccctctggctctctattgcattcattgtactgtttgcagctttgatgagcttcctcacaggccaattattccagaagtctgtggatgccgctcccacacagcaagaggactcatggacgtctctagaacatatcttgtggccatttaccagactccgacacaatgggccaccaccagtgtga

SEQ ID NO: 81 - DNA, 312 bp, Homo sapiens
atggcggataaggagaagaagaaaaaggagagcatcttggacttgtccaagtacatcgacaagacgatccgggtaaagttccagggaggccgcgaagccagtggaatcctgaagggcttcgacccactcctcaaccttgtgctggacggcaccattgagtacatgcgagaccctgacgaccagtacaagctcacggaggacacccggcagctgggcctcgtggtgtgccggggcacgtccgtggtgctaatctgcccgcaggacggcatggaggccatccccaaccccttcatccagcagcaggacgcctag

SEQ ID NO: 82 - DNA, 3771 bp, Homo sapiens
atgcccgggccccgaggggctgctggcggcctggcccctgagatgcgcggggcgggggcggcggggctgctggcgctgctgctgctgctgctgctgctgctgctgggcctgggcggcagggtcgagggggggccggccggcgagcggggcgcaggcgggggcggggcgctggcccgcgagcgcttcaaggtggtctttgcgccggtgatctgcaagcggacctgtctcaagggccagtgtcgggacagttgtcagcagggctccaacatgacgctcatcggagagaacggccacagcacagacacgctcacgggctccggcttccgcgtggtggtgtgccctctcccctgcatgaatggcggccagtgctcctcgcgaaaccagtgcctgtgtcccccggacttcactgggcgcttctgccaggtgcccgcaggaggagccggtgggggtaccggcggctcaggccccggcctgagcaggacaggggccctgtccacaggggcgctgccgcccctggctccggagggcgactctgtggccagcaagcacgccatctacgccgtccaggtgatcgctgaccctcctgggcccggggaggggcctcctgcccagcacgcagccttcctggtgcccctaggcccgggacagatctcagcagaagtgcaggccccgccccccgtggtgaatgtgcgcgtccatcacccgcccgaggcctcagtccaggtgcaccgcattgagagctcgaacgccgagagcgcagccccctcccagcacctgctgccgcaccccaagccctcgcacccccggccgcccacccagaagcccctgggccgctgctttcaggacactctgcccaagcagccgtgtggcagcaaccccctccccggcctcaccaagcaggaagactgctgcggtagcatcggcactgcctggggccagagcaagtgccacaagtgtccccagctgcagtacacaggagtgcagaagccagggcctgtacgtggggaagtgggcgctgactgtccccagggctacaagaggcttaacagcacccactgccaggacatcaacgagtgcgcaatgccgggcgtgtgtcgccatggtgactgcctcaacaaccctggctcctatcgctgtgtctgcccacctggccatagtttaggcccctcccgtacacagtgcattgcagacaaaccggaggagaagagcctgtgtttccgcctggtgagccctgagcaccagtgccagcacccactgaccacccgcctgacccgccagctctgctgctgcagtgtcggcaaggcctggggcgcgcggtgtcagcgctgcccaacagatggcaccgctgcgttcaaggagatctgcccagctgggaagggataccacattctcacctcccaccagacgctcaccattcagggcgagagtgacttttcccttttcctgcaccctgacgggccacccaagccccagcagcttccggagagccctagccaggctccaccacctgaggacacagaggaagagagaggggtgaccacggactcaccggtgagtgaggagaggtcagtgcagcagagccacccaactgccaccacgactcctgcccggccctaccccgagctgatctcccgtccctcgcccccgaccatgcgctggttcctgccggacttgcctccttcccgcagcgccgtagagatcgctcccactcaggtcacagagactgatgagtgccgactgaaccagaacatctgtggccacggagagtgcgtgccgggcccccctgactactcctgccactgcaaccccggctaccggtcacatccccagcaccgctactgcgtggatgtgaacgagtgcgaggcagagccctgtggcccggggaggggcatctgcatgaacaccggcggctcctacaattgccactgcaaccgcggctaccgcctgcacgtgggcgccggggggcgctcgtgcgtggacctgaacgaatgcgccaagccccacctgtgcggcgacggcggcttctgcatcaactttcccggtcactacaagtgcaactgctaccccggctaccggctcaaagcctcccggcctcctgtgtgcgaagacatcgacgagtgccgggacccaagctcttgcccggatggcaaatgcgagaacaagcccgggagcttcaagtgcatcgcctgtcagcctggctaccgcagccaggggggcggggcctgtcgcgacgtgaacgagtgcgccgagggcagcccctgctcgcctggctggtgcgagaacctcccgggctccttccgctgcacctgtgcccagggctacgcgcccgcgcccgacggccgcagttgcttggatgtggacgagtgtgaggctggggacgtgtgtgacaatggcatctgcagcaacacgccaggatctttccagtgtcagtgcctctctggctaccatctgtccagggaccggagccactgcgaggacattgatgagtgtgacttccctgcagcctgcattgggggtgactgcatcaataccaatggctcctacagatgtctttgcccccaggggcatcggctggtgggtggcaggaaatgccaagacatagatgagtgcagccaggacccgagcctgtgccttccccatggggcctgcaagaaccttcagggctcctatgtgtgtgtctgcgatgagggcttcactcccacccaggaccagcacggttgtgaggaggtggagcagccccaccacaagaaggagtgctacctgaacttcgatgacacagtgttctgcgacagcgtattggccaccaacgtgacccagcaggagtgctgctgctctctgggggccggctggggcgaccactgcgaaatctacccctgcccagtctacagctcagccgagttccacagcctctgcccagacggaaagggctacacccaggacaacaacatcgtcaactacggcatcccagcccaccgtgacatcgacgagtgcatgttgttcgggtcggagatttgcaaggagggcaagtgcgtgaacacgcagcctggctacgagtgctactgcaagcagggcttctactacgacgggaacctgctggaatgcgtggacgtggacgagtgcctggacgagtccaactgccggaacggagtgtgtgagaacacgcgcggcggctaccgctgtgcctgcacgccccctgccgagtacagtcccgcgcagcgccagtgcctgagcccggaagagatggagcgtgccccggagcggcgcgacgtgtgctggagccagcgcggagaggacggcatgtgcgctggccccctggccgggcctgccctcaccttcgacgactgctgctgccgccagggccgcggctggggcgcccaatgccgaccgtgcccgccgcgcggcgcggggtcccattgcccgacatcgcagagcgagagcaattccttctgggacacaagccccctgctgttggggaagcccccaagagatgaggacagttcagaggaggattcagacgagtgtcgctgcgtgagtggccgctgcgtgccgcggccgggcggcgccgtgtgcgagtgtcccggcggcttccagctcgacgcctcccgcgcccgctgcgtggatatcgacgagtgccgagagctgaaccagcgcgggctgctgtgcaagagcgagcgctgcgtgaacaccagcggctccttccgctgcgtctgcaaagccggcttcgcgcgcagccgcccgcacggggcctgcgttccccagcgccgccgctga

SEQ ID NO: 83 - DNA, 462 bp, Homo sapiens
atggcccccgcagcggcgacggggggcagcaccctgcccagtggcttctcggtcttcaccaccttgcccgacttgctcttcatctttgagtttatcttcgggggcctggtgtggatcctggtggcctcctccctggtgccctggcccctggtccagggctgggtgatgttcgtgtctgtgttctgcttcgtggccaccaccaccttgatcatcctgtacataattggagcccacggtggagagacttcctgggtcaccttggacgcagcctaccactgcaccgctgccctcttttacctcagcgcctcagtcctggaggccctggccaccatcacgatgcaagacggcttcacctacaggcactaccatgaaaacattgctgccgtggtgttctcctacatagccactctgctctacgtggtccatgcggtgttctctttaatcagatggaagtcttcataa

SEQ ID NO: 84 - DNA, 2244 bp, Homo sapiens
atggtccccgggtccgagggcccggcccgcgccgggagcgtggtggccgacgtggtgtttgtgattgagggtacggccaacctgggaccctacttcgaggggctccgcaagcactacctgctcccggccatcgagtattttaatggtggtcctcctgctgagacggacttcgggggagactatggggggacccagtacagcctcgtggtgttcaacacagtggactgcgctcccgagtcctacgtacaatgtcacgctcccaccagcagcgcctatgagtttgtcacctggctcgatggcattaagttcatgggcgggggtggtgagagctgcagcctcatcgcggaaggactcagcacagccttgcagctgtttgatgacttcaagaagatgcgcgagcagattggccagacgcaccgggtctgcctcctcatctgcaactcacccccatacttgttgcctgctgttgagagcaccacgtactctggatgcacaactgagaatcttgtgcagcagattggggagcgggggatccacttctccattgtgtctccccggaagctgcctgcgcttcggcttctgtttgagaaggcagcccccccggccttgctggagccgctgcagcctccgacagatgtgagccaggacccgaggcacatggtgctggttcggggactcgtgctgcctgttgggggtggctcagccccaggccccctccagtcaaagcagccagtccccctgcctcccgccgcaccctcaggtgccactctctcagcagccccccagcagcctctgccccccgtccccccgcagtaccaggttcccgggaacctgagtgcagctcaggtggccgcgcagaatgcagtggaggctgccaagaaccagaaggctgggctgggccctcgcttctcgcccatcacccctctccaacaagctgctcccggagtgggtccccccttcagccaggccccagctccccaactacccccaggaccccctggcgcccccaagccaccacctgcttcccagcccagtctggtctccactgtggcccctggctccggcctggctcccacggcacagcccggggcaccgtccatggcaggcactgtggccccaggaggggtgagcggcccttccccagcccagctgggagccccagccctcggtgggcagcagtcagtctccaataagcttctggcctggagcggggtcctggagtggcaagagaaacccaaacctgcctcagtggatgccaacaccaagctgacgcggtcactgccctgccaggtctacgtgaatcatggcgagaacctgaagacggagcagtggccccagaagctgatcatgcagctcatcccccagcagctgctgaccaccctgggccctttgttccggaactcaaggatggtccagttccatttcaccaacaaggacctggagtctctcaaaggcctctaccgcatcatgggcaacggcttcgcgggctgcgtgcacttcccccacacggcgccctgtgaggtgcgcgtgctcatgctcctgtactcgtccaagaagaagatcttcatgggcctcatcccctacgaccagagcggcttcgtcaacggcatccggcaggtcatcaccaaccacaagcaggtccagcagcagaagctggagcagcagcagcgaggaatggggggacagcaggcacccccagggctggggcccattctggaggaccaagccaggccctcacagaatctgctccagctccgcccaccgcagccccagcctcagggtaccgtaggggcctctggggccacggggcagccccagccccaaggtactgcccagcccccgccaggtgcccctcaaggccctcctggagcagcttctggcccaccccctcctggacccatccttcggccccagaaccctggggccaaccctcagctgcgaagcctcctcctcaacccaccaccgccgcagactggggtgcccccaccccaggcctccctccaccacctccagccaccaggggctcctgcgctgctgcctccgccgcaccagggcctggggcagccccagttggggcccccactcctgcatccaccacctgcccagtcctggcccgcacaacttccccctcgggctccactgccaggtcagatgctgctgagcgggggtccccggggcccggtcccccagccgggcctgcagcccagcgtcatggaggacgacatcctcatggatctcatctga

SEQ ID NO: 85 - DNA, 273 bp, Homo sapiens
atgagggaccctgtgagtagccagtacagttcctttcttttctggaggatgcccatcccagaactggatctgtcggagctggaaggcctgggtctgtcagatacagccacctacaaggtcaaagacagcagcgttggcaaaatgatcgggcaagcaactgcagcagaccaggagaaaaaccctgaaggtgatggcctccttgagtacagcaccttcaacttctggagagctcccattgccagcatccactccttcgaactggacttgctctaa

SEQ ID NO: 86 - DNA, 777 bp, Homo sapiens
atggcggcgtctgtattaaacaccgtgctgaggcggcttcctatgctatctctcttccgaggttctcacagagttcaggttcccctccagactctttgcaccaaagctccctctgaggaagattctttgtcctcagttcccatttctccttataaggatgagccctggaaatatctggaatcagaagaataccaggagcgatatggttctcgccccgtctgggctgactaccgccgcaaccacaagggtggtgtacccccacagcggactcggaagacatgtattcgtcggaataaagttgttgggaatccctgccccatctgtcgagatcacaagttgcatgttgactttaggaacgtgaagctcttggagcaatttgtctgcgcccacacgggtatcatcttctatgctccatacacaggagtctgtgtgaagcagcacaagcggttgacccaggccatccagaaagccagggatcatggtctcctcatttaccacatcccccaggttgaaccacgggaccttgacttcagtacctctcatggggctgtgagtgctactccgccagcccccaccctggtctcaggtgacccctggtacccatggtacaactggaaacagccaccggagagagaactgtctcgccttcgccggctttaccagggtcatctccaagaagagagtggccccccacctgagtcaatgcccaagatgccccctagaacaccagcggaagcctcctccactgggcagacaggccctcagagtgctctgtag

SEQ ID NO: 87 - DNA, 2205 bp, Homo sapiens
atgaggcctgcggtgctgggctccccagaccgagcacccccagaagatgaggggcctgtcatggtgaagctagaggactctgaggaggagggtgaggctgccttatgggacccaggccctgaagctgcacgcctgcgtttccggtgcttccgctatgaggaggccacagggccccaagaggccctggcccagctccgagagctgtgtcgccagtggctgcgtccagaggtacgctccaaggagcagatgctggagctgttggtgctggagcagttcctgggcgcactgccccctgagatccaggcccgtgtgcaggggcagcggccaggcagccccgaggaggctgctgccctagtagatgggctgcgccgggagccgggcggaccccggagatgggtcacagtccaggtgcagggccaggaggtcctatcagagaagatggagccctccagtttccagcccctacctgaaactgagcctccaactccagagcctgggcccaagacacctcctaggactatgcaggaatcaccactgggcctgcaggtgaaagaggagtcagaggttacagaggactcagatttcctggagtctgggcctctagctgccacccaggagtctgtacccaccctcctgcctgaggaggcccagagatgtgggaccgtgctggaccagatctttccccacagcaagactgggcctgagggtccctcatggagggagcaccccagggccctgtggcatgaggaagctgggggcatcttctccccagggttcgcgctgcagctaggcagcatctccgcaggtccaggtagtgtaagccctcacctccacgtcccctgggacctcggcatggctggcctttctggccagatccaatcaccctcccgcgaaggtggctttgcgcatgcgcttctgctccccagcgatctgaggagtgaacaggaccccacggacgaggatccctgccggggtgtgggccctgctctgatcaccacccgctggcgctcccccaggggccggagccggggccgccccagcactgggggcggggtggttaggggcggccgttgcgatgtatgtggcaaggtgttcagccaacgcagcaacctgctgaggcaccagaagatccacacgggtgagcgaccattcgtgtgcagcgagtgcggccgcagcttcagccgcagctcgcacctgctgcgccaccagcttacgcacaccgaggagcggccgttcgtgtgcggcgactgtggccagggcttcgtgcgcagcgcgcgcctggaagagcatcggagagtgcacacgggcgaacagcctttccgttgcgctgagtgcggccagagcttccggcagcgctccaatctgctgcagcaccagcgcatccacggcgatcccccgggccctggcgctaagcccccggcccctcctggtgcgcccgagcctcccggcccctttccgtgcagcgagtgccgcgagagcttcgcgcggcgcgccgtgctgctggagcaccaggcggtacacacgggcgacaagtcctttggctgcgtcgagtgcggcgagcgcttcggccgccgctcagtgctgctgcagcaccggcgcgtgcacagtggcgagcggcccttcgcctgtgccgagtgcggccagagcttccggcagcgctccaacctgacgcagcaccggcgcatccacaccggggagcggcccttcgcctgcgccgagtgtggcaaggccttccgccagcggcctacgctcacgcagcatctccgcgtacacacgggcgagaaaccctttgcctgccccgagtgtggccagcgcttcagccagcgcctcaagctcacgcgtcatcagaggacacacaccggcgaaaagccctaccactgcggtgagtgcggcctgggcttcacgcaggtctcgcggctcaccgagcaccagcgcatccacacgggcgaacggcccttcgcctgccccgagtgcggccagagctttcggcagcacgccaacctcacccagcaccggcgcatccacacgggtgaacggccctacgcatgccctgagtgtggcaaggccttccgccagcggcccacgctcacgcagcatctgcgcacccaccgacgagagaagcccttcgcctgccaggactgtggccgccgcttccaccagagcaccaagctcattcagcaccagcgcgtccacagcgccgagtag

SEQ ID NO: 88 - DNA, 2223 bp, Homo sapiens
atgcagtggacgaaggtgttggggctggggctgggggctgctgccctcttggggctggggatcatcctcggccactttgccatccccaaaaaagccaactcactggccccccaggacctggacctggagatcctggagaccgtcatggggcagctggatgcccacaggatccgggagaacctcagagaactctccagggagccacacctggcctccagccctcgggatgaggacctggtgcagctgctgctgcagcgctggaaggacccagagtcaggcctggactcggccgaggcctccacgtacgaagtgctgctgtccttccctagccaggagcagcccaacgtcgtggacatcgtgggccccactgggggcatcatccactcctgccaccggactgaggagaacgtgaccggggagcaaggggggccagatgtggtacaaccctatgctgcctatgctccttctggaaccccacagggcctcctcgtctatgccaaccggggcgcggaagaagactttaaggagctacagactcagggcatcaaacttgaaggcaccattgccctgactcgatatgggggtgtagggcgtggggccaaggctgtgaacgctgccaagcacggggtagctggggtgctggtgtacacagaccctgccgacatcaacgatgggctgagctcacccgacgaaacctttcccaactcctggtacctgcccccctcaggagtggagcgaggctcctactacgagtattttggggaccctctgactccctaccttccagccgtcccctcttccttccgcgtggaccttgccaatgtctccggatttcccccaattcctacacagcccattggcttccaggatgcaagagacctgctctgtaacctcaacggaactttggccccagccacctggcagggagcactgggctgccactacaggttgggtcccggcttccggcctgacggagacttcccagcagacagccaggtgaatgtgagcgtctacaaccgcctggagctgaggaactcttccaacgtcctgggcatcatccgtggggctgtggagcctgatcgctacgtgctgtatgggaaccaccgagacagctgggtgcacggggctgtggaccccagcagtggcaccgccgtcctcctggagctctcccgtgtcctggggaccctgctgaagaagggcacctggcgtcctcgcagatcaatcgtgtttgcgagctggggggctgaggagtttgggctcattggctccacggaattcacagaagagttcttcaacaagctgcaggagcgcacggtggcctacatcaacgtggacatctcggtgtttgccaacgctacccttagggtgcaggggacgccccctgtccagagcgtcgtcttctctgcaaccaaagagatccgctcaccaggccctggcgacctgagcatctacgacaactggatccggtacttcaaccgcagcagcccggtgtacggcctggtccccagcttgggttctctgggtgctggcagcgactatgcacccttcgttcacttcctgggcatctcctccatggacattgcctatacctatgaccggagcaagacttcagccaggatctaccccacctaccacacagcctttgacacctttgactatgtggacaagtttttggacccgggcttcagcagccatcaggctgtggcccggacagcggggagtgtgattctccggctcagtgacagcttcttcctgcccctcaaagtcagtgactacagtgagacactccgcagcttcctgcaggcagcccagcaagatcttggggccctgctggagcagcacagcatcagcctggggcctctggtgactgcagtggagaagtttgaggcagaagctgcagccttgggccaacgcatatcaacactgcagaagggcagccctgaccccctgcaggtccggatgctcaatgaccagttgatgctcttggaacggacctttctgaaccctagagccttcccagaggaacgctactacagccatgtgctctgggcacctcgcacgggctccgtagtcacattcccgggcctatccaatgcctgctccagggccagggacacagcttctggatctgaagcttgggctgaggtccagagacagctcagcattgtggtgacagccctggagggtgcggcagccaccctgaggcctgtggctgacctctga

SEQ ID NO: 89 - DNA, 648 bp, Homo sapiens
atgcccggcgaagccacagaaaccgtccctgctacagagcaggagttgccgcagccccaggctgagacagggtctggaacagaatctgacagtgatgaatcagtaccagagcttgaagaacaggattccacccaggcaaccacacaacaagcccagctggcggcagcagctgaaattgatgaagaaccagtcagtaaagcaaaacagagtcggagtgaaaagaaggcacggaaggctatgtccaaactgggtcttcggcaggttacaggagttactagagtcactatccggaaatctaagaatatcctctttgtcatcacaaaaccagatgtctacaagagccctgcttcagatacttacatagtttttggggaagccaagatcgaagatttatcccagcaagcacaactagcagctgctgagaaattcaaagttcaaggtgaagctgtctcaaacattcaagaaaacacacagactccaactgtacaagaggagagtgaagaggaagaggtcgatgaaacaggtgtagaagttaaggacattgaattggtcatgtcacaagcaaatgtgtcgagagcaaaggcagtccgagccctgaagaacaacagtaatgatattgtaaatgcgattatggaattaacaatgtaa

SEQ ID NO: 90 - DNA, 1176 bp, Homo sapiens
atggcagacattgacaacaaagaacagtctgaacttgatcaagatttggatgatgttgaagaagtagaagaagaggaaactggtgaagaaacaaaactcaaagcacgtcagctaactgttcagatgatgcaaaatcctcagattcttgcagcccttcaagaaagacttgatggtctggtagaaacaccaacaggatacattgaaagcctgcctagggtagttaaaagacgagtgaatgctctcaaaaacctgcaagttaaatgtgcacagatagaagccaaattctatgaggaagttcacgatcttgaaaggaagtatgctgttctctatcagcctctatttgataagcgatttgaaattattaatgcaatttatgaacctacggaagaagaatgtgaatggaaaccagatgaagaagatgagatttcggaggaattgaaagaaaaggccaagattgaagatgagaaaaaagatgaagaaaaagaagaccccaaaggaattcctgaattttggttaactgtttttaagaatgttgacttgctcagtgatatggttcaggaacacgatgaacctattctgaagcacttgaaagatattaaagtgaagttctcagatgctggccagcctatgagttttgtcttagaatttcactttgaacccaatgaatattttacaaatgaagtgctgacaaagacatacaggatgaggtcagaaccagatgattctgatcccttttcttttgatggaccagaaattatgggttgtacagggtgccagatagattggaaaaaaggaaagaatgtcactttgaaaactattaagaagaagcagaaacacaagggacgtgggacagttcgtactgtgactaaaacagtttccaatgactctttctttaacttttttgcccctcctgaagttcctgagagtggagatctggatgatgatgctgaagctatccttgctgcagacttcgaaattggtcactttttacgtgagcgtataatcccaagatcagtgttatattttactggagaagctattgaagatgatgatgatgattatgatgaagaaggtgaagaagcggatgaggaaggggaagaagaaggagatgaggaaaatgatccagactatgacccaaagaaggatcaaaacccagcagagtgcaagcagcagtga

SEQ ID NO: 91 - DNA, 792 bp, Homo sapiens
atggaggagagcgggtacgagtcggtgctctgtgtcaagcctgacgtccacgtctaccgcatccctccgcgggctaccaaccgtggctacagggctgcggagtggcagctggaccagccatcatggagtggccggctgaggatcactgcaaagggacagatggcctacatcaagctggaggacaggacgtcaggggagctctttgctcaggccccggtggatcagtttcctggcacagctgtggagagtgtgacggattccagcaggtacttcgtgatccgcatcgaagatggaaatgggcgacgggcgtttattggaattggcttcggggaccgaggtgatgcctttgacttcaatgttgcattgcaggaccatttcaagtgggtgaaacagcagtgtgaatttgcaaaacaagcccagaacccagaccaaggccctaaactggacctgggcttcaaggagggccagaccatcaagctcaacatcgcaaacatgaagaagaaggaaggagcagctgggaatccccgagtccggcctgccagcacaggagggctgagcctgcttccccctcccccaggggggaaaacctccaccctgatccctccccctggggagcagttggctgtggggggatccctcgtccagccagcagttgctcccagttcaggaggtgctcctgtaccctggccacagcccaatcctgccactgctgacatctggggagactttaccaaatctacaggatcaacttccagccagacccagccaggcacaggctgggtccagttctga

SEQ ID NO: 92 - DNA, 1629 bp, Homo sapiens
atggtggcacatgatgagactggaggtctcctacctattaaaaggaccatacgagtcctagatgtcaataaccagtccttcagagaacaagaggagccaagcaataaaagagttcgacctctggctcgtgtcacgtccttggcaaatttaatctctcctgtaagaaatggagctgtcagacgttttggtcaaacaatacagtcatttacccttcgtggtgaccacagatccccagcctctgcccagaagttttctagcaggtcaacagtcccaacacccgccaagagaaggagcagtgcactgtggtcagagatgctggacatcaccatgaaggagtctctcaccaccagggagatcagacggcaggaggcaatatatgaaatgtcccgaggtgaacaggatttaattgaggatctcaaacttgcaagaaaggcctatcatgaccccatgttaaagttgtccatcatgtcagaagaggaactcacacatatatttggtgatctggactcttacatacctctgcatgaagatttgttgacaagaataggagaagcaaccaagcctgatggaacagtggagcagattggtcacattctcgtgagctggttaccgcgcttgaatgcctacagaggttactgtagtaaccagctggcagccaaagctcttcttgatcaaaagaaacaggatccaagagtccaagacttcctccagcgatgtctcgagtctcccttcagtcgaaaactagatctttggagtttcctagatatccctcgaagtcgcctagtcaaataccctttactgttaaaagaaattcttaaacacactccaaaagagcaccctgatgttcagcttctggaggatgctatattgataatacagggagtcctctctgatatcaacttgaagaaaggtgaatccgagtgccagtattacatcgacaagctggagtacctggatgaaaagcagagggaccccagaatcgaagcgagcaaagtgctgctgtgccatggggagctgcggagcaagagtggacataaactttacattttcctgtttcaagacatcttggttctgactcggcccgtcacacggaacgaacggcactcttaccaggtttaccggcagccaatcccagtccaagagctagtcctagaagacctgcaggatggagatgtgagaatgggaggctcctttcgaggagctttcagtaactcagagaaagctaaaaatatctttagaattcgcttccatgacccctctccagcccagtctcacactctgcaagccaatgacgtgttccacaagcagcagtggttcaactgtattcgagcggccattgcccccttccagtcggcaggcagtccacctgagctgcagggcctgccggagctgcacgaagagtgtgaggggaaccacccctctgcgaggaaactcacagcccagaggagggcatccacagtttccagtgttactcaggtagaagttgatgaaaacgcttacagatgtggctctggcatgcagatggcagaggacagcaagagcttaaagacacaccagacacagcccggcatccgaagagcgagggacaaagccctttctggtggcaaacggaaagagactttggtgtag

SEQ ID NO: 93 - DNA, 336 bp, Homo sapiens
atggcaaatattcaccaggaaaacgaagagatggagcagcctatgcagaatggagaggaagaccgccctttgggaggaggtgaaggccaccagcctgcaggaaatcgacggggacaggctcgccgacttgcccctaattttcgatgggccatacccaataggcagatcaatgatgggatgggtggagatggagatgatatggaaatattcatggaggagatgagagaaatcagaagaaaacttagggagctgcagttgaggaattgtctgcgtatccttatgggggagctctctaatcaccatgaccatcatgatgaattttgccttatgccttga

SEQ ID NO: 94 - DNA, 498 bp, Homo sapiens
atggagctctgccggtccctggccctgctggggggctccctgggcctgatgttctgcctgattgctttgagcaccgatttctggtttgaggctgtgggtcccacccactcagctcactcgggcctctggccaacagggcatggggacatcatatcaggctacatccacgtgacgcagaccttcagcattatggctgttctgtgggccctggtgtccgtgagcttcctggtcctgtcctgcttcccctcactgttccccccaggccacggcccgcttgtctcaaccaccgcagcctttgctgcagccatctccatggtggtggccatggcggtgtacaccagcgagcggtgggaccagcctccacacccccagatccagaccttcttctcctggtccttctacctgggctgggtctcagctatcctcttgctctgtacaggtgccctgagcctgggtgctcactgtggcggtccccgtcctggctatgaaaccttgtga

SEQ ID NO: 95 - DNA, 906 bp, Homo sapiens
atgacgcggcatggcaagaactgcaccgcaggggccgtctacacctaccacgagaagaagaaggacacagcggcctcgggctatgggacccagaacattcgactgagccgggatgccgtgaaggacttcgactgctgttgtctctccctgcagccttgccacgatcctgttgtcaccccagatggctacctgtatgagcgtgaggccatcctggagtacattctgcaccagaagaaggagattgcccggcagatgaaggcctacgagaagcagcggggcacccggcgcgaggagcagaaggagcttcagcgggcggcctcgcaggaccatgtgcggggcttcctggagaaggagtcggctatcgtgagccggcccctcaaccctttcacagccaaggccctctcgggcaccagcccagatgatgtccaacctgggcccagtgtgggtcctccaagtaaggacaaggacaaagtgctgcccagcttctggatcccgtcgctgacgcccgaagccaaggccaccaagctggagaagccgtcccgcacggtgacctgccccatgtcagggaagcccctgcgcatgtcggacctgacgcccgtgcacttcacaccgctagacagctccgtggaccgcgtggggctcatcacccgcagcgagcgctacgtgtgtgccgtgacccgcgacagcctgagcaacgccaccccctgcgctgtgctgcggccctctggggctgtggtcaccctcgaatgcgtggagaagctgattcggaaggacatggtggaccctgtgactggagacaaactcacagaccgcgacatcatcgtgctgcagcggggcggtaccggcttcgcgggctccggagtgaagctgcaagcggagaaatcacggccggtgatgcaggcctga

SEQ ID NO: 96 - DNA, 1545 bp, Homo sapiens
atggcactgatgcaggaactgtatagcacaccagcctccaggctggactccttcgtggctcagtggctgcagccccaccgggagtggaaggaagaggtgctagacgctgtgcggaccgtggaggagtttctgaggcaggagcatttccaggggaagcgtgggctggaccaggatgtgcgggtgctgaaggtagtcaaggtgggctccttcgggaatggcacggttctcaggagcaccagagaggtggagctggtggcgtttctgagctgtttccacagcttccaggaggcagccaagcatcacaaagatgttctgaggctgatatggaaaaccatgtggcaaagccaggacctgctggacctcgggctcgaggacctgaggatggagcagagagtccccgatgctctcgtcttcaccatccagaccagggggactgcggagcccatcacggtcaccattgtgcctgcctacagagccctggggccttctcttcccaactcccagccaccccctgaggtctatgtgagcctgatcaaggcctgcggtggtcctggaaatttctgcccatccttcagcgagctgcagagaaatttcgtgaaacatcggccaactaagctgaagagcctcctgcgcctggtgaaacactggtaccagcagtatgtgaaagccaggtcccccagagccaatctgccccctctctatgctcttgaacttctaaccatctatgcctgggaaatgggtactgaagaagacgagaatttcatgttggacgaaggcttcaccactgtgatggacctgctcctggagtatgaagtcatctgtatctactggaccaagtactacacactccacaatgcaatcattgaggattgtgtcagaaaacagctcaaaaaagagaggcccatcatcctggatccggccgaccccaccctcaacgtggcagaagggtacagatgggacatcgttgctcagagggcctcccagtgcctgaaacaggactgttgctatgacaacagggagaaccccatctccagctggaacgtgaagagggcacgagacatccacttgacagtggagcagaggggttacccagatttcaacctcatcgtgaacccttatgagcccataaggaaggttaaagagaaaatccggaggaccaggggctactctggcctgcagcgtctgtccttccaggttcctggcagtgagaggcagcttctcagcagcaggtgctccttagccaaatatgggatcttctcccacactcacatctatctgctggagaccatcccctccgagatccaggtcttcgtgaagaatcctgatggtgggagctacgcctatgccatcaaccccaacagcttcatcctgggtctgaagcagcagattgaagaccagcaggggcttcctaaaaagcagcagcagctggaattccaaggccaagtcctgcaggactggttgggtctggggatctatggcatccaagacagtgacactctcatcctctcgaagaagaaaggagaggctctgtttccagccagttag

SEQ ID NO: 97 - DNA, 1935 bp, Homo sapiens
atgaacgctgcggccagcagctaccccatggcctccctgtacgtgggcgacctgcattcggacgtcaccgaggccatgctgtacgaaaagttcagccccgcggggcctgtgctgtccatccgggtctgccgcgatatgatcacccgccgctccctgggctatgcctacgtcaacttccagcagccggccgacgctgagcgggctttggacaccatgaactttgatgtgattaagggaaagccaatccgcatcatgtggtctcagagggatccctctttgagaaaatctggtgtgggaaacgtcttcatcaagaacctggacaaatctatagataacaaggcactttatgatactttttctgcttttggaaacatactgtcctgcaaggtggtgtgtgatgagaacggctctaagggttatgcctttgtccacttcgagacccaagaggctgccgacaaggccatcgagaagatgaatggcatgctcctcaatgaccgcaaagtatttgtgggcagattcaagtctcgcaaagagcgggaagctgagcttggagccaaagccaaggaattcaccaatgtttatatcaaaaactttggggaagaggtggatgatgagagtctgaaagagctattcagtcagtttggtaagaccctaagtgtcaaggtgatgagagatcccaatgggaaatccaaaggctttggctttgtgagttacgaaaaacacgaggatgccaataaggctgtggaagagatgaatggaaaagaaataagtggtaaaatcatatttgtaggccgtgcacaaaagaaagtagaacggcaggcagagttaaaacggaaatttgaacagttgaaacaggagagaattagtcgatatcagggggtgaatctctacattaagaacttggatgacactattgatgatgagaaattaaggaaagaattttctccttttggatcaattaccagtgctaaggtaatgctggaggatggaagaagcaaagggtttggcttcgtctgcttctcatctcctgaagaagcaaccaaagcagtcactgagatgaatggacgcattgtgggctccaagccactatatgttgccctggcccagaggaaggaagagagaaaggctcacctgaccaaccagtatatgcaacgagtggctggaatgagagcacttcctgccaatgccatcttaaatcagttccagcctgcagcgggtggctactttgtgccagcagtcccacaggctcagggaaggcctccatattatacacctaaccagttagcacagatgaggcctaatccacgctggcagcaaggtgggagacctcaaggcttccaaggaatgccaagtgctatacgccagtctgggcctcgtccaactcttcgccatctggctccaactgggtctgagtgcccggaccgcttggctatggactttggtggggctggtgccgcccagcaagggctgactgacagctgccagtctggaggcgttcccacagctgtgcagaacttagcgccacgcgctgctgttgctgctgctgctccccgggctgttgccccctacaaatacgcctccagtgtccgcagccctcatcctgccatacagcctctgcaggcaccccagcctgcggtccatgtgcaggggcaggagccactgactgcctccatgctggctgcagcacccccccaggaacagaagcagatgctgggagaacgcttgttcccactcatccaaacaatgcattcaaatctggctgggaagatcacgggaatgctgctggagatagacaactctgagctgctgcacatgttagagtcccccgagtctctccgctccaaggtggatgaagctgtagcagttctacaggctcatcatgccaagaaagaagctgcccagaaggtgggcgctgttgctgctgctacctcttag

SEQ ID NO: 98 - DNA, 1602 bp, Homo sapiens
atggctccaaagccgaagccctgggtacagactgagggccctgagaagaagaagggccggcaggcaggaagggaggaggaccccttccgctccaccgctgaggccctcaaggccatacccgcagagaagcgcataatccgcgtggatccaacatgtccactcagcagcaaccccgggacccaggtgtatgaggactacaactgcaccctgaaccagaccaacatcgagaacaacaacaacaagttctacatcatccagctgctccaagacagcaaccgcttcttcacctgctggaaccgctggggccgtgtgggagaggtcggccagtcaaagatcaaccacttcacaaggctagaagatgcaaagaaggactttgagaagaaatttcgggaaaagaccaagaacaactgggcagagcgggaccactttgtgtctcacccgggcaagtacacacttatcgaagtacaggcagaggatgaggcccaggaagctgtggtgaaggtggacagaggcccagtgaggactgtgactaagcgggtgcagccctgctccctggacccagccacgcagaagctcatcactaacatcttcagcaaggagatgttcaagaacaccatggccctcatggacctggatgtgaagaagatgcccctgggaaagctgagcaagcaacagattgcacggggtttcgaggccttggaggcgctggaggaggccctgaaaggccccacggatggtggccaaagcctggaggagctgtcctcacacttttacaccgtcatcccgcacaacttcggccacagccagcccccgcccatcaattcccctgagcttctgcaggccaagaaggacatgctgctggtgctggcggacatcgagctggcccaggccctgcaggcagtctctgagcaggagaagacggtggaggaggtgccacaccccctggaccgagactaccagcttctcaagtgccagctgcagctgctagactctggagcacctgagtacaaggtgatacagacctacttagaacagactggcagcaaccacaggtgccctacacttcaacacatctggaaagtaaaccaagaaggggaggaagacagattccaggcccactccaaactgggtaatcggaagctgctgtggcatggcaccaacatggccgtggtggccgccatcctcactagtgggctccgcatcatgccacattctggtgggcgtgttggcaagggcatctactttgcctcagagaacagcaagtcagctggatatgttattggcatgaagtgtggggcccaccatgtcggctacatgttcctgggtgaggtggccctgggcagagagcaccatatcaacacggacaaccccagcttgaagagcccacctcctggcttcgacagtgtcattgcccgaggccacaccgagcctgatccgacccaggacactgagttggagctggatggccagcaagtggtggtgccccagggccagcctgtgccctgcccagagttcagcagctccacattctcccagagcgagtacctcatctaccaggagagccagtgtcgcctgcgctacctgctggaggtccacctctga

SEQ ID NO: 99 - DNA, 780 bp, Homo sapiens
atggacgcctgggtccgcttcagtgctcagagccaagcccgggagcggctgtgtagggccgcccagtatgcttgctctcttcttggccatgcgctgcagaggcatggagccagtcctgagttacagaaacagattcgacaactggagagccacctgagccttggaagaaagcttctacgcctgggtaactcagcagatgcccttgagtcagccaaaagagctgttcacctatcagatgttgtcctgagattctgcatcactgttagtcacctcaatcgagccttgtacttcgcctgtgacaatgtcctgtgggctggaaagtctggactggctccccgtgtggatcaggagaagtgggcccagcgttcattcaggtactatttgttttccctcatcatgaatttgagccgtgatgcttatgagattcgcctactgatggagcaagagtcttctgcttgtagccggcgactgaaaggttctggaggaggagtcccaggaggaagtgaaactgggggacttgggggaccagggactccaggaggaggtctgccccaactggctctgaaacttcggctgcaagtcctgctcctggctcgagtccttagaggtcatcccccacttctgctagacgtggtcagaaatgcctgtgatctcttcattcctctggacaaactaggcctctggcgctgtggccctgggattgtggggctttgtggcctcgtgtcctccatcctgtctattctcaccctaatctatccctggctacgactcaagccctga

SEQ ID NO: 100 - DNA, 2343 bp, Homo sapiens
atggccgcggtggacctggagaagctgcgggcgtcgggcgcgggcaaggccatcggcgtcctgaccagcggcggcgacgcgcaaggcatgaacgctgctgtccgggctgtgacgcgcatgggcatttatgtgggtgccaaagtcttcctcatctacgagggctatgagggcctcgtggagggaggtgagaacatcaagcaggccaactggctgagcgtctccaacatcatccagctgggcggcactatcattggcagcgctcgctgcaaggcctttaccaccagggaggggcgccgggcagcggcctacaacctggtccagcacggcatcaccaacctgtgcgtcatcggcggggatggcagcctcacaggtgccaacatcttccgcagcgagtggggcagcctgctggaggagctggtggcggaaggtaagatctcagagactacagcccggacctactcgcacctgaacatcgcgggcctagtgggctccatcgataacgacttctgcggcaccgacatgaccatcggcacggactcggccctccaccgcatcatggaggtcatcgatgccatcaccaccactgcccagagccaccagaggaccttcgtgctggaagtgatgggccggcactgcgggtacctggcgctggtatctgcactggcctcaggggccgactggctgttcatccccgaggctccacccgaggacggctgggagaacttcatgtgtgagaggctgggtgagactcggagccgtgggtcccgactgaacatcatcatcatcgctgagggtgccattgaccgcaacgggaagcccatctcgtccagctacgtgaaggacctggtggttcagaggctgggcttcgacacccgtgtaactgtgctgggccacgtgcagcggggagggacgccctctgccttcgaccggatcctgagcagcaagatgggcatggaggcggtgatggcgctgctggaagccacgcctgacacgccggcctgcgtggtcaccctctcggggaaccagtcagtgcggctgcccctcatggagtgcgtgcagatgaccaaggaagtgcagaaagccatggatgacaagaggtttgacgaggccacccagctccgtggtgggagcttcgagaacaactggaacatttacaagctcctcgcccaccagaagccccccaaggagaagtctaacttctccctggccatcctgaatgtgggggccccggcggctggcatgaatgcggccgtgcgctcggcggtgcggaccggcatctcccatggacacacagtatacgtggtgcacgatggcttcgaaggcctagccaagggtcaggtgcaagaagtaggctggcacgacgtggccggctggttggggcgtggtggctccatgctggggaccaagaggaccctgcccaagggccagctggagtccattgtggagaacatccgcatctatggtattcacgccctgctggtggtcggtgggtttgaggcctatgaaggggtgctgcagctggtggaggctcgcgggcgctacgaggagctctgcatcgtcatgtgtgtcatcccagccaccatcagcaacaacgtccctggcaccgacttcagcctgggctccgacactgctgtaaatgccgccatggagagctgtgaccgcatcaaacagtctgcctcggggaccaagcgccgtgtgttcatcgtggagaccatggggggttactgtggctacctggccaccgtgactggcattgctgtgggggccgacgccgcctacgtcttcgaggaccctttcaacatccacgacttaaaggtcaacgtggagcacatgacggagaagatgaagacagacattcagaggggcctggtgctgcggaacgagaagtgccatgactactacaccacggagttcctgtacaacctgtactcatcagagggcaagggcgtcttcgactgcaggaccaatgtcctgggccacctgcagcagggtggcgctccaaccccctttgaccggaactatgggaccaagctgggggtgaaggccatgctgtggttgtcggagaagctgcgcgaggtttaccgcaagggacgggtgttcgccaatgccccagactcggcctgcgtgatcggcctgaagaagaaggcggtggccttcagccccgtcactgagctcaagaaagacactgatttcgagcaccgcatgccacgggagcagtggtggctgagcctgcggctcatgctgaagatgctggcacaataccgcatcagtatggccgcctacgtgtcaggggagctggagcacgtgacccgccgcaccctgagcatggacaagggcttctga

SEQ ID NO: 101 - DNA, 2355 bp, Homo sapiens
atggacgcggacgactcccgggcccccaagggctccttgcggaagttcctggagcacctctccggggccggcaaggccatcggcgtgctgaccagcggcggggatgctcaaggtatgaacgctgccgtccgtgccgtggtgcgcatgggtatctacgtgggggccaaggtgtacttcatctacgagggctaccagggcatggtggacggaggctcaaacatcgcagaggccgactgggagagtgtctccagcatcctgcaagtgggcgggacgatcattggcagtgcgcggtgccaggccttccgcacgcgggaaggccgcctgaaggctgcttgcaacctgctgcagcgcggcatcaccaacctgtgtgtgatcggcggggacgggagcctcaccggggccaacctcttccggaaggagtggagtgggctgctggaggagctggccaggaacggccagatcgataaggaggccgtgcagaagtacgcctacctcaacgtggtgggcatggtgggctccatcgacaatgatttctgcggcaccgacatgaccatcggcacggactccgccctgcacaggatcatcgaggtcgtcgacgccatcatgaccacggcccagagccaccagaggaccttcgttctggaggtgatgggacgacactgtgggtacctggccctggtgagtgccttggcctgcggtgcggactgggtgttccttccagaatctccaccagaggaaggctgggaggagcagatgtgtgtcaaactctcggagaaccgtgcccggaaaaaaaggctgaatattattattgtggctgaaggagcaattgatacccaaaataaacccatcacctctgagaaaatcaaagagcttgtcgtcacgcagctgggctatgacacacgtgtgaccatcctcgggcacgtgcagagaggagggaccccttcggcattcgacaggatcttggccagccgcatgggagtggaggcagtcatcgccttgctagaggccaccccggacaccccagcttgcgtcgtgtcactgaacgggaaccacgccgtgcgcctgccgctgatggagtgcgtgcagatgactcaggatgtgcagaaggcgatggacgagaggagatttcaagatgcggttcgactccgagggaggagctttgcgggcaacctgaacacctacaagcgacttgccatcaagctgccggatgatcagatcccaaagaccaattgcaacgtagctgtcatcaacgtgggggcacccgcggctgggatgaacgcagccgtacgctcagctgtgcgcgtgggcattgccgacggccacaggatgctcgccatctatgatggctttgacggcttcgccaagggccagatcaaagaaatcggctggacagatgtcgggggctggaccggccaaggaggctccattcttgggacaaaacgcgttctcccggggaagtacttggaagagatcgccacacagatgcgcacgcacagcatcaacgcgctgctgatcatcggtggattcgaggcctacctgggactcctggagctgtcagccgcccgggagaagcacgaggagttctgtgtccccatggtcatggttcccgctactgtgtccaacaatgtgccgggttccgatttcagcatcggggcagacaccgccctgaacactatcaccgacacctgcgaccgcatcaagcagtccgccagcggaaccaagcggcgcgtgttcatcatcgagaccatgggcggctactgtggctacctggccaacatgggggggctcgcggccggagctgatgccgcatacattttcgaagagcccttcgacatcagggatctgcagtccaacgtggagcacctgacggagaaaatgaagaccaccatccagagaggccttgtgctcagaaatgagagctgcagtgaaaactacaccaccgacttcatttaccagctgtattcagaagagggcaaaggcgtgtttgactgcaggaagaacgtgctgggtcacatgcagcagggtggggcaccctctccatttgatagaaactttggaaccaaaatctctgccagagctatggagtggatcactgcaaaactcaaggaggcccggggcagaggaaaaaaatttaccaccgatgattccatttgtgtgctgggaataagcaaaagaaacgttatttttcaacctgtggcagagctgaagaagcaaacggattttgagcacaggattcccaaagaacagtggtggctcaagctacggcccctcatgaaaatcctggccaagtacaaggccagctatgacgtgtcggactcaggccagctggaacatgtgcagccctggagtgtctga

SEQ ID NO: 102 - DNA, 900 bp, Homo sapiens
atggcccagaacttgaaggacttggcgggacggctgcccgccgggccccggggcatgggcacggccctgaagctgttgctgggggccggcgccgtggcctacggtgtgcgcgaatctgtgttcaccgtggaaggcgggcacagagccatcttcttcaatcggatcggtggagtgcagcaggacactatcctggccgagggccttcacttcaggatcccttggttccagtaccccattatctatgacattcgggccagacctcgaaaaatctcctcccctacaggctccaaagacctacagatggtgaatatctccctgcgagtgttgtctcgacccaatgctcaggagcttcctagcatgtaccagcgcctagggctggactacgaggaacgagtgttgccgtccattgtcaacgaggtgctcaagagtgtggtggccaagttcaatgcctcacagctgatcacccagcgggcccaggtatccctgttgatccgccgggagctgacagagagggccaaggacttcagcctcatcctggatgatgtggccatcacagagctgagctttagccgagagtacacagctgctgtagaagccaaacaagtggcccagcaggaggcccagcgggcccaattcttggtagaaaaagcaaagcaggaacagcggcagaaaattgtgcaggccgagggtgaggccgaggctgccaagatgcttggagaagcactgagcaagaaccctggctacatcaaacttcgcaagattcgagcagcccagaatatctccaagacgatcgccacatcacagaatcgtatctatctcacagctgacaaccttgtgctgaacctacaggatgaaagtttcaccaggggaagtgacagcctcatcaagggtaagaaatga

SEQ ID NO: 103 - DNA, 792 bp, Homo sapiens
atgctgttggcctgggtacaagcattcctcgtcagcaacatgctcctagcagaagcctatggatctggaggctgtttctgggacaacggccacctgtaccgggaggaccagacctcccccgcgccgggcctccgctgcctcaactggctggacgcgcagagcgggctggcctcggcccccgtgtcgggggccggcaatcacagttactgccgaaacccggacgaggacccgcgcgggccctggtgctacgtcagtggcgaggccggcgtccctgagaaacggccttgcgaggacctgcgctgtccagagaccacctcccaggccctgccagccttcacgacagaaatccaggaagcgtctgaagggccaggtgcagatgaggtgcaggtgttcgctcctgccaacgccctgcccgctcggagtgaggcggcagctgtgcagccagtgattgggatcagccagcgggtgcggatgaactccaaggagaaaaaggacctgggaactctgggctacgtgctgggcattaccatgatggtgatcatcattgccatcggagctggcatcatcttgggctactcctacaagagggggaaggatttgaaagaacagcatgatcagaaagtatgtgagagggagatgcagcgaatcactctgcccttgtctgccttcaccaaccccacctgtgagattgtggatgagaagactgtcgtggtccacaccagccagactccagttgaccctcaggagggcaccaccccccttatgggccaggccgggactcctggggcctga

SEQ ID NO: 104 - DNA, 732 bp, Homo sapiens
atgagccctgcagccccggtcccgcctgactccgctctggaaagtccttttgaagaaatggccctggtgaggggcggctggctgtggagacagagctccatcctccgccgctggaagcggaactggtttgccctgtggctggacgggaccctgggatactaccacgatgagacagcgcaggacgaggaggaccgtgtgctcatccacttcaatgtccgtgacataaagatcggcccagagtgccatgatgtgcagcccccagagggccggagccgagatggcctgctgactgtgaacctacgggaaggcggccgcctgcacctctgtgcggagaccaaggatgatgccctagcatggaagacagcactgctggaggcaaactccaccccggccccagctggagccaccgtccctcccaggagccgccgggtttgctccaaggtcaggtgtgtgacccgctcgtggagcccctgtaaggttgagaggcggatctgggtgcgcgtctacagcccgtaccaagactactacgaggtggtgccccccaatgcacacgaggccacgtatgtccgcagctactacggaccgccctacgcaggccctggcgtgacgcacgtgatagtgcgggaggatccctgctacagcgccggcgcccctctggccatgggcatgcttgcgggagccgccactggggcggcgctgggctcgctcatgtggtcgccctgctggttctga

SEQ ID NO: 105 - DNA, 492 bp, Homo sapiens
atggtgcggttcaagcacaggtacctgctctgcgaactggtgtctgacgacccccgctgccgcctaagcctcgatgaccgagttctgagcagcctcgtacgggacacgatcgccagggtgcacggaactttcggcgcagccgcctgctccatcggcttcgcggttcgatatctcaatgcctatactggaatagtgctacttcgatgcagaaaagaattctatcagcttgtgtggtcagctcttcccttcatcacatacttggagaacaaaggacaccgttacccatgctttttcaacacattacatgtgggaggtacaataagaacatgtcagaagttcctaattcagtacaacaggagacagctgttgatcttgttgcagaactgcactgatgaaggagagcgggaagctatccagaagtctgtgacaagaagctgcttattagaggaggaggaggagtcaggtgaggaggctgcagaagcaatggagtga

SEQ ID NO: 106 - DNA, 1530 bp, Homo sapiens
atgcttctctcgttacctgccttacatcttcagacctccgaacaccatcctttcttccagctgccacacagaaggctcggaccatggtgcagtcccactggctcccctgcccccctctcctgtgagactggctgcggggagggatcatggatacttgtctgccggcttctggttcccacgcaagtaagcctgctgtcaatggaggaggacattgatacccgcaaaatcaacaacagtttcctgcgcgaccacagctatgcgaccgaagctgacattatctctacggtagaattcaaccacacgggagaattactagcgacaggggacaaggggggtcgggttgtaatatttcaacgagagcaggagagtaaaaatcaggttcatcgtaggggtgaatacaatgtttacagcacattccagagccatgaacccgagttcgattacctgaagagtttagaaatagaagaaaaaatcaataaaataagatggctcccccagcagaatgcagcttactttcttctgtctactaatgataaaactgtgaagctgtggaaagtcagcgagcgtgataagaggccagaaggctacaatctgaaagatgaggagggccggctccgggatcctgccaccatcacaaccctgcgggtgcctgtcctgagacccatggacctgatggtggaggccaccccacgaagagtatttgccaacgcacacacatatcacatcaactccatatctgtcaacagcgactatgaaacctacatgtccgctgatgacctgaggattaacctatggaactttgaaataaccaatcaaagttttaatattgtggacattaagccagccaacatggaggagctcacggaggtgatcacagcagccgagttccacccccatcattgcaacaccttcgtgtacagcagcagcaaagggacaatccggctgtgtgacatgcgggcatctgccctgtgtgacaggcacaccaaattttttgaagagccggaagatccaagcaacagatcatttttctctgaaattatctcttcgatttcggatgtgaagttcagccacagtgggaggtatatcatgaccagggactacttgaccgtcaaagtctgggatctcaacatggaaaaccgccccatcgagacttaccaggttcatgactacctccgcagcaagctgtgttccctctatgaaaatgactgcatttttgataaatttgagtgtgtgtggaatgggtcagacagtgtcatcatgacaggctcctacaacaacttcttcaggatgttcgacagaaacaccaagcgtgatgtgacccttgaggcttcgagggaaaacagcaagccccgggctatcctcaaaccccgaaaagtgtgtgtggggggcaagcggagaaaagacgagatcagtgtcgacagtctggactttagcaaaaagatcttgcatacagcttggcatccttcagaaaatattatagcagtggcggctacaaataacctatatatattccaggacaaggttaactag

SEQ ID NO: 107 - DNA, 2478 bp, Homo sapiens
atgttggatatttgcttggaaaaacgtgtgggtacgaccttggctgcccccaagtgtaactccagcactgtgaggtttcagggattggcagaggggaccaaggggaccatgaaaatggacatggaggatgcggatatgactctgtggacagaggctgagtttgaagagaagtgtacatacattgtgaacgaccacccctgggattctggtgctgatggcggtacttcggttcaggcggaggcatccttaccaaggaatctgcttttcaagtatgccaccaacagtgaagaggttattggagtgatgagtaaagaatacataccaaagggcacacgttttggacccctaataggtgaaatctacaccaatgacacagttcctaagaacgccaacaggaaatatttttggaggatctattccagaggggagcttcaccacttcattgacggctttaatgaagagaaaagcaactggatgcgctatgtgaatccagcacactctccccgggagcaaaacctggctgcgtgtcagaacgggatgaacatctacttctacaccattaagcccatccctgccaaccaggaacttcttgtgtggtattgtcgggactttgcagaaaggcttcactacccttatcccggagagctgacaatgatgaatctcacacaaacacagagcagtctaaagcaaccgagcactgagaaaaatgaactctgcccaaagaatgtcccaaagagagagtacagcgtgaaagaaatcctaaaattggactccaacccctccaaaggaaaggacctctaccgttctaacatttcacccctcacatcagaaaaggacctcgatgactttagaagacgtgggagccccgaaatgcccttctaccctcgggtcgtttaccccatccgggcccctctgccagaagactttttgaaagcttccctggcctacgggatcgagagacccacgtacatcactcgctcccccattccatcctccaccactccaagcccctctgcaagaagcagccccgaccaaagcctcaagagctccagccctcacagcagccctgggaatacggtgtcccctgtgggccccggctctcaagagcaccgggactcctacgcttacttgaacgcgtcctacggcacggaaggtttgggctcctaccctggctacgcacccctgccccacctcccgccagctttcatcccctcgtacaacgctcactaccccaagttcctcttgcccccctacggcatgaattgtaatggcctgagcgctgtgagcagcatgaatggcatcaacaactttggcctcttcccgaggctgtgccctgtctacagcaatctcctcggtgggggcagcctgccccaccccatgctcaaccccacttctctcccgagctcgctgccctcagatggagcccggaggttgctccagccggagcatcccagggaggtgcttgtcccggcgccccacagtgccttctcctttaccggggccgccgccagcatgaaggacaaggcctgtagccccacaagcgggtctcccacggcgggaacagccgccacggcagaacatgtggtgcagcccaaagctacctcagcagcgatggcagcccccagcagcgacgaagccatgaatctcattaaaaacaaaagaaacatgaccggctacaagacccttccctacccgctgaagaagcagaacggcaagatcaagtacgaatgcaacgtttgcgccaagactttcggccagctctccaatctgaaggtccacctgagagtgcacagtggagaacggcctttcaaatgtcagacttgcaacaagggctttactcagctcgcccacctgcagaaacactacctggtacacacgggagaaaagccacatgaatgccaggtctgccacaagagatttagcagcaccagcaatctcaagacccacctgcgactccattctggagagaaaccataccaatgcaaggtgtgccctgccaagttcacccagtttgtgcacctgaaactgcacaagcgtctgcacacccgggagcggccccacaagtgctcccagtgccacaagaactacatccatctctgtagcctcaaggttcacctgaaagggaactgcgctgcggccccggcgcctgggctgcccttggaagatctgacccgaatcaatgaagaaatcgagaagtttgacatcagtgacaatgctgaccggctcgaggacgtggaggatgacatcagtgtgatctctgtagtggagaaggaaattctggccgtggtcagaaaagagaaagaagaaactggcctgaaagtgtctttgcaaagaaacatggggaatggactcctctcctcagggtgcagcctttatgagtcatcagatctacccctcatgaagttgcctcccagcaacccactacctctggtacctgtaaaggtcaaacaagaaacagttgaaccaatggatccttaa

SEQ ID NO: 108 - DNA, 2637 bp, Homo sapiens
atggccaccgccccctcttatcccgccgggctccctggctctcccgggccggggtctcctccgccccccggcggcctagagctgcagtcgccgccaccgctactgccccagatcccggccccgggttccggggtctcctttcacatccagatcgggctgacccgcgagttcgtgctgttgcccgccgcctccgagctggctcatgtgaagcagctggcctgttccatcgtggaccagaagttccctgagtgtggcttctacggcctttacgacaagatcctgcttttcaaacatgaccccacgtcggccaacctcctgcagctggtgcgctcgtccggagacatccaggagggcgacctggtggaggtggtgctgtcggcctcggccaccttcgaggacttccagatccgcccgcacgccctcacggtgcactcctatcgggcgcctgccttctgtgatcactgcggggagatgctcttcggcctagtgcgccagggcctcaagtgcgatggctgcgggctgaactaccacaagcgctgtgccttcagcatccccaacaactgtagtggggcccgcaaacggcgcctgtcatccacgtctctggccagtggccactcggtgcgcctcggcacctccgagtccctgccctgcacggctgaagagctgagccgtagcaccaccgaactcctgcctcgccgtcccccgtcatcctcttcctcctcttctgcctcatcgtatacgggccgccccattgagctggacaagatgctgctctccaaggtcaaggtgccgcacaccttcctcatccacagctatacacggcccaccgtttgccaggcttgcaagaaactcctcaagggcctcttccggcagggcctgcaatgcaaagactgcaagtttaactgtcacaaacgctgcgccacccgcgtccctaatgactgcctgggggaggcccttatcaatggagatgtgccgatggaggaggccaccgatttcagcgaggctgacaagagcgccctcatggatgagtcagaggactccggtgtcatccctggctcccactcagagaatgcgctccacgccagtgaggaggaggaaggcgagggaggcaaggcccagagctccctggggtacatccccctaatgagggtggtgcaatcggtgcgacacacgacgcggaaatccagcaccacgctgcgggagggttgggtggttcattacagcaacaaggacacgctgagaaagcggcactattggcgcctggactgcaagtgtatcacgctcttccagaacaacacgaccaacagatactataaggaaattccgctgtcagaaatcctcacggtggagtccgcccagaacttcagccttgtgccgccgggcaccaacccacactgctttgagatcgtcactgccaatgccacctacttcgtgggcgagatgcctggcgggactccgggtgggccaagtgggcagggggctgaggccgcccggggctgggagacagccatccgccaggccctgatgcccgtcatccttcaggacgcacccagcgccccaggccacgcgccccacagacaagcttctctgagcatctctgtgtccaacagtcagatccaagagaatgtggacattgccactgtctaccagatcttccctgacgaagtgctgggctcagggcagtttggagtggtctatggaggaaaacaccggaagacaggccgggacgtggcagttaaggtcattgacaaactgcgcttccctaccaagcaggagagccagctccggaatgaagtggccattctgcagagcctgcggcatcccgggatcgtgaacctggagtgcatgttcgagacgcctgagaaagtgtttgtggtgatggagaagctgcatggggacatgttggagatgatcctgtccagtgagaagggccggctgcctgagcgcctcaccaagttcctcatcacccagatcctggtggctttgagacaccttcacttcaagaacattgtccactgtgacttgaaaccagaaaacgtgttgctggcatcagcagacccatttcctcaggtgaagctgtgtgactttggctttgctcgcatcatcggcgagaagtcgttccgccgctcagtggtgggcacgccggcctacctggcacccgaggtgctgctcaaccagggctacaaccgctcgctggacatgtggtcagtgggcgtgatcatgtacgtcagcctcagcggcaccttccctttcaacgaggatgaggacatcaatgaccagatccagaacgccgccttcatgtacccggccagcccctggagccacatctcagctggagccattgacctcatcaacaacctgctgcaggtgaagatgcgcaaacgctacagcgtggacaaatctctcagccacccctggttacaggagtaccagacgtggctggacctccgagagctggaggggaagatgggagagcgatacatcacgcatgagagtgacgacgcgcgctgggagcagtttgcagcagagcatccgctgcctgggtctgggctgcccacggacagggatctcggtggggcctgtccaccacaggaccacgacatgcaggggctggcggagcgcatcagtgttctctga

SEQ ID NO: 109 - DNA, 1251 bp, Homo sapiens
atggtccgtccgcgccgtgccccgtaccgctccggcgccgggggccccctcgggggtcgcggccgccctccgcggcccctcgtggtgcgcgccgtccgctcgcgctcctggcctgccagcccccgaggcccgcagcctccgcggatccgggcccgctcggcccctcccatggaaggtgctcgggtcttcggggcactgggtcccatcggtccctcctcacctgggctcaccctcgggggtctggccgtgagcgagcaccggctcagcaacaagctgctggcttggagcggcgtcctcgagtggcaggagaagcgcagaccctactctgactccactgcaaagctgaagcggaccctgccctgccaagcctacgtgaaccaaggcgagaacctggagaccgaccagtggccgcagaagctgatcatgcagctgatccctcagcagctgctgaccaccctgggccccctgttccggaactcccagttggcacagttccacttcaccaacagagactgcgactcgctcaaggggctctgccgcatcatgggcaacggcttcgcgggctgcatgctgttcccccacatctccccctgtgaggtgcgcgtgctcatgctcctgtactcgtccaagaagaagatcttcatgggcctcatcccctacgaccagagcggcttcgtcagtgccatccggcaggtcatcaccacccgcaagcaggcagtgggacctggtggtgtcaactcaggcccagtccagatcgtcaacaacaagtttctggcatggagtggtgtcatggagtggcaggagcccaggcctgagcccaacagtcggtccaagaggtggctgccatcccacgtctacgtgaaccagggggagatcctgaggaccgagcagtggccaaggaagctgtacatgcagctcatcccgcagcagctgctgaccaccctagtgccgctgttccggaactcgcgcctggtccagttccacttcaccaaggacctggagacactgaagagcctgtgccggatcatggacaatggcttcgccggctgcgtgcacttttcctacaaagcatcgtgtgagatccgcgtgcttatgctcctgtactcttcagagaagaaaatcttcattggcctcatcccccatgaccagggcaactttgtcaacggcatccggcgtgtcattgccaaccagcagcaggtcctgcagcggaacctggagcaggagcaacagcaacgagggatgggggggtag

SEQ ID NO: 110 - DNA, 1674 bp, Homo sapiens
atggacgacctcgacgccctgctggcggacttggagtctaccacctcccacatctccaaacggcctgtgttcttgtcggaggagaccccctactcatacccaactggaaaccacacataccaggagattgccgtgccaccccccgtccccccacccccgtccagcgaggccctcaatggcacaatccttgaccccttagaccagtggcagcccagcagctcccgattcatccaccagcagcctcagtcctcatcacctgtgtacggctccagtgccaaaacttccagtgtctccaaccctcaggacagtgttggctctccgtgctcccgagtgggtgaggaggagcacgtctacagcttccccaacaagcagaaatcagctgagccttcacccaccgtaatgagcacgtccctgggcagcaacctttctgaactcgaccgcctgctgctggaactgaacgctgtacagcataacccgccaggcttccctgcagatgaggccaactcaagccccccgcttcctggggccctgagccccctctatggtgtcccagagactaacagccccttgggaggcaaagctgggcccctgacgaaagagaagcctaagcggaatgggggccggggcctggaggacgtgcggcccagtgtggagagtctcttggatgaactggagagctccgtgcccagccccgtccctgccatcactgtgaaccagggcgagatgagcagcccgcagcgcgtcacctccacccaacagcagacacgcatctcggcctcctctgccaccagggagctggacgagctgatggcttcgctgtcggatttcaagttcatggcccaggggaagacagggagcagctcaccccctggggggcccccgaagcccgggagccagctggacagcatgctggggagcctgcagtctgacctgaacaagctgggggtcgccacagtcgccaaaggagtctgcggggcctgcaagaagcccatcgccgggcaggttgtgaccgccatggggaagacgtggcaccccgagcacttcgtctgcacccactgccaggaggagatcggatcccggaacttcttcgagcgggatggacagccctactgtgaaaaggactaccacaacctcttctccccgcgctgctactactgcaacggccccatcctggataaagtggtgacagcccttgaccggacgtggcaccctgaacacttcttctgtgcacagtgtggagccttctttggtcccgaagggttccacgagaaggacggcaaggcctactgtcgcaaggactacttcgacatgttcgcacccaagtgtggcggctgcgcccgggccatcctggagaactatatctcagccctcaacacgctgtggcatcctgagtgctttgtgtgccgggaatgcttcacgccattcgtgaacggcagcttcttcgagcacgacgggcagccctactgtgaggtgcactaccacgagcggcgcggctcgctgtgttctggctgccagaagcccatcaccggccgctgcatcaccgccatggccaagaagttccaccccgagcacttcgtctgtgccttctgcctcaagcagctcaacaagggcaccttcaaggagcagaacgacaagccttactgtcagaactgcttcctcaagctcttctgctag

SEQ ID NO: 111 - DNA, 2946 bp, Homo sapiens
atggctgccgacagtgagcccgaatccgaggtatttgagatcacggacttcaccactgcctcggaatgggaaaggtttatttccaaagttgaagaagtcttgaatgactggaaactgattggaaactctttgggaaagccactcgaaaagggtatatttacttctggcacatgggaagagaaatcagatgaaatttcctttgctgacttcaagttctcagtcactcatcattatcttgtacaagagtccactgataaagaaggaaaggatgagttattagaggatgttgttccacaatctatgcaagatttgctgggtatgaataatgactttcctccaagagcacattgcctggtaagatggtatgggctacgtgagttcgtggtgattgcccctgctgcacacagtgacgctgttctcagcgaatctaagtgcaaccttcttctgagttctgtttctattgccttgggaaacactggctgtcaggtgccactctttgtgcaaattcaccacaaatggcgaagaatgtatgtaggagaatgtcaaggtcctggtgtacgaactgatttcgaaatggttcatcttagaaaagtgccaaatcagtacactcacttatcaggtctgctggatatcttcaaatcaaagattggatgtcctttaactccattgcctccagttagtattgctattcgatttacctatgtacttcaagattggcagcagtatttttggcctcagcaacctccagacatagatgcccttgtaggaggagaagttggaggcttggagtttggcaagttaccatttggtgcctgcgaagatcctattagtgaactccatttagctactacatggcctcatctgaccgaagggatcattgtggataatgatgtttattctgatttggatcctattcaagctccacattggtctgttagagttcgaaaagctgagaatcctcagtgtttgctaggtgattttgtcactgaattttttaaaatttgccgtcgaaaggagtcaactgatgagattcttggacgatctgcatttgaggaagaaggcaaagaaactgctgatataactcatgctttgtcaaaattgacagagccggcatcagttccaattcataaattatcagtttcaaatatggtacacactgcaaagaagaaaatccgaaaacacagaggtgtagaggagtcaccgctaaataatgatgttcttaatactattctcctgttcttattccctgatgctgtttctgagaaaccattagatggaactacttcaacagataataataatcctccatcagagagtgaagactataatctctacaatcagttcaagtctgcaccatctgacagtttaacatacaaactggctttgtgtctctgtatgatcaatttttaccatggagggttgaaaggagtggcacacctctggcaggaatttgttcttgaaatgcgtttccgatgggaaaacaactttctgattccaggattagcaagtggacccccagatctgaggtgttgtttactgcatcagaaactacagatgttaaattgttgtattgaaagaaagaaggcacgtgatgaggggaaaaagacaagtgcttcagatgtcactaatatatatccaggggatgctggaaaagcaggagaccagttggtgccagataatctaaaagaaacagataaggaaaagggagaggtaggaaaatcttgggattcctggagtgacagcgaagaagaattttttgaatgcctaagtgatactgaagaacttaaaggaaatggacaagagagtggcaagaaaggaggacctaaggagatggcaaatttaaggccggaaggacggctctatcagcatgggaaacttacactgctgcataatggagaacctctctacattccagtaacccaggaaccagcacctatgacagaagatctgctagaagagcagtctgaagttttagctaaattaggtacatcggcagagggggctcaccttcgagcacgcatgcagagtgcctgtctgctctcagatatggagtcttttaaggcagctaatccaggttgctccctggaagattttgtgaggtggtattcaccccgggattatattgaagaggaggtgattgatgaaaagggcaatgtggtgctgaaaggagaactgagtgcccggatgaagattccaagcaatatgtgggtagaagcctgggaaacagctaagccaattcctgctagaaggcaaaggagactctttgatgatacacgggaagcagaaaaggtgctgcactatctggcaatccagaaacctgcagaccttgctcggcacctgttaccttgtgtgattcatgcagctgtactcaaggtaaaggaagaagaaagtctcgaaaacatttcttcagttaagaagatcataaagcagataatatcccattccagtaaagttttgcacttccccaatccagaagacaagaaattggaagaaatcattcaccagattactaatgtggaagctctcattgccagagctcggtcactaaaagccaagtttggaactgagaaatgtgaacaggaggaggaaaaggaagatcttgaaaggtttgtgagttgcctgctggagcagcctgaagtgttagtcaccggtgcaggaagaggacatgctggcaggatcattcacaagctgtttgtgaatgcccagagggctgcagctatgactccaccagaggaggaattgaagagaatgggctccccagaggaaagaaggcagaactccgtgtcagacttcccaccccctgctggccgggaattcattttgcgcaccactgtgccgcgccctgctccctactccaaagctctgcctcagcggatgtacagtgttctcaccaaagaggactttagacttgcaggtgccttttcatcagatacttccttcttctga

SEQ ID NO: 112 - DNA, 2448 bp, Homo sapiens
atggaggtcagagcttcattacagaaggttagtggatcatctgattctgtggctacaatgaacagtgaagaatttgttttggttcctcagtatgcagatgataattctacaaaacatgaagaaaaacctcaactgaagatagtttctaatggtgatgaacaattggaaaaagccatggaagagattttgagagattccgagaaaaggccaagcagtcttcttgttgattgtcaaagttccagtgagatttcagaccattcgtttggagatattccagccagccaaacaaataagccatctcttcagttaattttggatccgtctaacacagaaatttctacacccagaccatcttctccaggtggactacctgaagaagatagtgttttatttaataaactgacctacttaggatgtatgaaggtttcttccccacgtaatgaagtagaggctttacgggcaatggcaaccatgaaatcttccagtcaatacccctttcctgttaccctgtatgtaccaaatgttccagaaggttctgtgagaattatagaccaatccagcaatgtggagatagcatcttttccaatctataaggtgttattctgtgcacgtggacatgacggaacaacagagagcaattgctttgcatttacagagagttcccatggttcggaagaatttcagatacatgttttctcctgtgaaattaaagaggcagtaagcagaattttgtacagtttctgtacagcattcaaacgttcttccagacaagtgtctgatgttaaagactcagttattcctacccccgacagtgatgtgtttaccttcagtgtctccttggaggtaaaagaagacgatggaaaaggaaactttagccctgtgcctaaggatagagataaattttatttcaaattaaagcaaggaatagagaagaaggttgtgattacagtgcagcaactttctaacaaagaattagctattgaaagatgttttggaatgttattaagcccaggtcgaaacgtgaagaacagtgacatgcatttactggatatggaatccatgggaaagagctatgatgggagagcttatgtcatcactggcatgtggaaccccaatgcaccagtatttctggcacttaacgaggaaaccccaaaagataagcaagtatacatgactgtggcagtggatatggtagtcacagaggtggtggagcctgttcgctttctcctggagacagtagtccgtgtgtaccctgcaaatgagcgattttggtatttcagcagaaagactttcacagagactttcttcatgagattgaaacagtctgagggaaaaggccataccaatgctggagatgcaatatatgaggtggtgagtctacagcgagagtctgacaaggaggaaccagtcactcctactagtggagggggtccaatgtcaccccaggatgatgaagcagaagaggagagtgataatgaactctcaagtggaacaggtgatgtgtctaaggattgtcctgagaagatcctgtattcttggggagagttgctaggaaaatggcacagtaaccttggtgcacgaccgaaagggctgtctactctggtgaagagtggtgtccctgaagcattgagggcagaggtatggcagttattggcaggctgccatgacaaccaggcaatgctggatagataccgaattcttatcacaaaggactcagcccaggagagtgttattactcgagatattcatcgtacatttcccgcacatgattactttaaagatactggaggagatggtcaagaatcgctctataagatctgcaaggcctactctgtgtatgatgaagacattgggtactgtcaagggcagtcttttcttgctgctgtattactgctgcatatgccagaggaacaagcattctgtgttttggtgaaaatcatgtacgactatggtttgagagacctctacagaaacaacttcgaagatcttcattgcaaattctaccagttggagagactaatgcaggaacagctaccggacctgcatagccatttttctgatctgaacctggaagctcatatgtatgcatcccagtggtttctcactctttttactgccaagttcccactctgcatggtgttccacatcattgacttactgctttgtgagggtttgaacataatctttcatgtagctttggctctcctaaagacctcaaaggaagaccttctgcaggctgattttgaaggtgctttaaagttctttagagttcagcttccaaagagatacagggcagaggaaaatgcaagaagactgatggagcaggcttgcaatattaaagtaccaaccaagaagctgaagaaatatgagaaagaatatcagacaatgcgagagagtcagctgcaacaggaagacccaatggatagatacaagtttgtatatttgtag

SEQ ID NO: 113 - DNA, 621 bp, Homo sapiens
atggctgcaaataagcccaagggtcagaattctttggctttacacaaagtcatcatggtgggcagtggtggcgtgggcaagtcagctctgactctacagttcatgtacgatgagtttgtggaggactatgagcctaccaaagcagacagctatcggaagaaggtagtgctagatggggaggaagtccagatcgatatcttagatacagctgggcaggaggactacgctgcaattagagacaactacttccgaagtggggaggggttcctctgtgttttctctattacagaaatggaatcctttgcagctacagctgacttcagggagcagattttaagagtaaaagaagatgagaatgttccatttctactggttggtaacaaatcagatttagaagataaaagacaggtttctgtagaagaggcaaaaaacagagctgagcagtggaatgttaactacgtggaaacatctgctaaaacacgagctaatgttgacaaggtattttttgatttaatgagagaaattcgagcgagaaagatggaagacagcaaagaaaagaatggaaaaaagaagaggaaaagtttagccaagagaatcagagaaagatgctgcattttataa

SEQ ID NO: 114 - DNA, 495 bp, Homo sapiens
atggcttcgccacaccaagagcccaaacctggagacctgattgagattttccgccttggctatgagcactgggccctgtatataggagatggctacgtgatccatctggctcctccaagtgagtaccccggggctggctcctccagtgtcttctcagtcctgagcaacagtgcagaggtgaaacgggagcgcctggaagatgtggtgggaggctgttgctatcgggtcaacaacagcttggaccatgagtaccaaccacggcccgtggaggtgatcatcagttctgcgaaggagatggttggtcagaagatgaagtacagtattgtgagcaggaactgtgagcactttgtcacccagctgagatatggcaagtcccgctgtaaacaggtggaaaaggccaaggttgaagtcggtgtggccacggcgcttggaatcctggttgttgctggatgctcttttgcgattaggagataccaaaaaaaagcgacagcctga

SEQ ID NO: 115 - DNA, 1206 bp, Homo sapiens
atgtccctgtacgatgacctaggagtggagaccagtgactcaaaaacagaaggctggtccaaaaacttcaaacttctgcagtctcagcttcaggtgaagaaggcagctctcactcaggcaaagagccaaaggacgaaacaaagtacagtcctcgccccagtcattgacctgaagcgaggtggctcctcagatgaccggcaaattgtggacactccaccgcatgtagcagctgggctgaaggatcctgttcccagtgggttttctgcaggggaagttctgattcccttagctgacgaatatgaccctatgtttcctaatgattatgagaaagtagtgaagcgccaaagagaggaacgacagagacagcgggagctggaaagacaaaaggaaatagaagaaagggaaaaaaggcgtaaagacagacatgaagcaagtgggtttgcaaggagaccagatccagattctgatgaagatgaagattatgagcgagagaggaggaaaagaagtatgggcggagctgccattgccccacccacttctctggtagagaaagacaaagagttaccccgagattttccttatgaagaggactcaagacctcgatcacagtcttccaaagcagccattcctcccccagtgtacgaggaacaagacagaccgagatctccaaccggacctagcaactccttcctcgctaacatggggggcacggtggcgcacaagatcatgcagaagtacggcttccgggagggccagggtctggggaagcatgagcagggcctgagcactgccttgtcagtggagaagaccagcaagcgtggcggcaagatcatcgtgggcgacgccacagagaaagatgcatccaagaagtcagattcaaatccgctgactgaaatacttaagtgtcctactaaagtggtcttactaaggaacatggttggtgcgggagaggtggatgaagacttggaagttgaaaccaaggaagaatgtgaaaaatatggcaaagttggaaaatgtgtgatatttgaaattcctggtgcccctgatgatgaagcagtacggatatttttagaatttgagagagttgaatcagcaattaaagcggttgttgacttgaatgggaggtattttggtggacgggtggtaaaagcatgtttctacaatttggacaaattcagggtcttggatttggcagaacaagtttga

SEQ ID NO: 116 - DNA, 1080 bp, Homo sapiens
atggtgaagctgttcatcggaaaccttccccgggaggctacagagcaggagattcgctcactcttcgagcagtatgggaaggtgctggaatgtgacatcattaagaattacggctttgtgcacatagaagacaagacggcagctgaggatgccatacgcaacctgcaccattacaagcttcatggggtgaacatcaacgtggaagccagcaagaataagagcaaagcttcaaccaagttacacgtgggtaacatcagccccacttgtaccaaccaagagcttcgagccaagtttgaggagtatggtccggtcatcgaatgtgacatcgtgaaagattatgccttcgtacacatggagcgggcagaggatgcagtggaggccatcaggggccttgacaacacagagtttcaaggcaaaagaatgcatgtgcagttgtccacaagccggcttcggactgcccctggtatgggagaccagagtggctgctatcggtgtgggaaagaagggcactggtccaaagagtgcccagtagatcgtacgggtcgtgtggcagactttactgagcagtataatgaacaatatggagcagttcgaacaccttacaccatgggctacggggaatccatgtattacaacgatgcatatggagcactcgactactataagcgataccgggtccgctcttatgaggcagtagcagcggcggcagcggcttctgcatacaactacgcagagcagaccatgtcccatctgcctcaagtccaaagcacaactgtgaccagccacctcaactctacttctgttgatccctatgacagacacctattgccaaactctggcgctgctgccacttcagctgctatggctgctgctgcagccaccacttcctcctactatggaagggacaggagcccactgcgtcgtgctgcagccatgctccccacagttggagagggctacggttatgggccagagagtgaattatctcaggcttccgcagctacacggaattctctgtatgacatggcccggtatgaacgggagcagtatgtggaccgagcccggtactcagccttttaa

SEQ ID NO: 117 - DNA, 1644 bp, Homo sapiens
atgttctactatcccaacgtgcttcagcgccacaccggctgctttgccaccatctggctggcggcgactcgcggcagccggttggtgaagcgcgaatacctgagggtgaatgtggtgaaaacctgcgaggaaatcctcaattacgtgctggtacgagtgcaacccccgcagcccggcctgccgcggccccgcttctccctctatctctcagcccaacttcagatcggtgtgatccgcgtctattctcaacaatgccagtacctcgtggaggacatccagcacatcttggagcgcctccaccgtgcccagctgcagatccgaatagatatggagactgagctacccagcctgctgcttcctaaccacctggccatgatggagaccctagaagatgctccagatcccttttttgggatgatgtctgtggatcccagacttcctagtcctttcgatatccctcagattcgacacctcttagaggctgcaatcccagagagagttgaagagatccctcctgaagttcctacagagcccagggagccagagaggattccggtcactgtgctgccacctgaggccatcacgatcctggaggcagagcccatacggatgctggagattgagggtgaacgggagctcccagaggtcagccgccgagaactggacctgctgatcgcagaggaagaagaagctatcttgttagaaatcccgcggctcccacctccagctcctgcagaggtggaaggaataggagaggcactgggtcctgaggagctgaggctgacaggctgggaacctggggccctactcatggaggtgacccccccggaggagctgcgtctgccagccccacccagcccagagaggaggcccccagtccccccacctcctcgccgccgccgtcgtcgccggttactgttctgggacaaggagactcagatctccccggagaaattccaggaacaactgcaaaccagagcccactgctgggaatgtcctatggtgcagccgcccgagaggaccatcagaggccctgcggagttgttcagaaccccaactctctctggctggctaccccctgaactactgggtctctggacccattgtgcccagccacccccaaaagccctcaggcgagagctgcctgaggaggcagccgctgaggaggaaaggagaaagattgaagttccaagtgagattgaggtcccgagggaggccctggagcccagtgttccccttatggtgtctttagagatctccctagaggcagctgaagaggagaagtcccgcatcagcctcatcccaccagaagaacggtgggcctggcctgaggtggaggcgccagaagctcctgcattgcccgtggtgcctgaactccctgaggtgcccatggagatgcctttggtgctgcccccagagctcgagctgctctcactggaagcagtgcacagggcagtggcactggagctgcaggctaacagggagcccgacttcagcagcctggtgtcacctctcagcccccgcaggatggctgcccgggtcttctacctgctcctggtgctctcagcgcaacagattcttcacgtgaaacaagaaaagccatatggtcgcctcctgatccagccggggcccagattccactga

SEQ ID NO: 118 - DNA, 660 bp, Homo sapiens
atggcggagtcgttgaggtctccgcgccgctccctgtacaaactggtgggctcgccgccttggaaagaggctttccggcagagatgcctggagagaatgagaaacagccgggacaggctcctaaacaggtaccgccaggctggaagcagtgggccagggaattctcagaacagctttctagttcaagaggtgatggaagaagagtggaatgctttgcagtcagtggagaattgtccagaagacttggctcagctggaggagctgatagacatggctgtgctggaggaaattcaacaggagctgatcaaccaagagcagtccatcatcagcgagtatgagaagagcttgcagtttgatgaaaagtgtctcagcatcatgctggctgagtgggaggcaaacccactcatctgtcctgtatgtacaaagtacaacctgagaatcacaagcggtgtggtggtgtgtcagtgtggcctgtccatcccatctcattcttctgagttgacagagcagaagcttcgtgcctgtttagagggtagtataaatgagcacagtgcacattgtccccacacacctgaattttcagtcactggaggaacagaagaaaagtccagtcttctcatgagctgtctggcctgtgatacttgggctgtgatcctctag

SEQ ID NO: 119 - DNA, 654 bp, Homo sapiens
atgagcagcaaagtctctcgcgacaccctgtacgaggcggtgcgggaagtcctgcacgggaaccagcgcaagcgccgcaagttcctggagacggtggagttgcagatcagcttgaagaactatgatccccagaaggacaagcgcttctcgggcaccgtcaggcttaagtccactccccgccctaagttctctgtgtgtgtcctgggggaccagcagcactgtgacgaggctaaggccgtggatatcccccacatggacatcgaggcgctgaaaaaactcaacaagaataaaaaactggtcaagaagctggccaagaagtatgatgcgtttttggcctcagagtctctgatcaagcagattccacgaatcctcggcccaggtttaaataaggcaggaaagttcccttccctgctcacacacaacgaaaacatggtggccaaagtggatgaggtgaagtccacaatcaagttccaaatgaagaaggtgttatgtctggctgtagctgttggtcacgtgaagatgacagacgatgagcttgtgtataacattcacctggctgtcaacttcttggtgtcattgctcaagaaaaactggcagaatgtccgggccttatatatcaagagcaccatgggcaagccccagcgcctatattaa

SEQ ID NO: 120 - DNA, 537 bp, Homo sapiens
atggcgcaggatcaaggtgaaaaggagaaccccatgcgggaacttcgcatccgcaaactctgtctcaacatctgtgttggggagagtggagacagactgacgcgagcagccaaggtgttggagcagctcacagggcagacccctgtgttttccaaagctagatacactgtcagatcctttggcatccggagaaatgaaaagattgctgtccactgcacagttcgaggggccaaggcagaagaaatcttggagaagggtctaaaggtgcgggagtatgagttaagaaaaaacaacttctcagatactggaaactttggttttgggatccaggaacacatcgatctgggtatcaaatatgacccaagcattggtatctacggcctggacttctatgtggtgctgggtaggccaggtttcagcatcgcagacaagaagcgcaggacaggctgcattggggccaaacacagaatcagcaaagaggaggccatgcgctggttccagcagaagtatgatgggatcatccttcctggcaaataa

SEQ ID NO: 121 - DNA, 498 bp, Homo sapiens
atgccgccgaagttcgaccccaacgagatcaaagtcgtatacctgaggtgcaccggaggtgaagtcggtgccacttctgccctggcccccaagatcggccccctgggtctgtctccaaaaaaagttggtgatgacattgccaaggcaacgggtgactggaagggcctgaggattacagtgaaactgaccattcagaacagacaggcccagattgaggtggtgccttctgcctctgccctgatcatcaaagccctcaaggaaccaccaagagacagaaagaaacagaaaaacattaaacacagtgggaatatcacttttgatgagattgtcaacattgctcgacagatgcggcaccgatccttagccagagaactctctggaaccattaaagagatcctggggactgcccagtcagtgggctgtaatgttgatggccgccatcctcatgacatcatcgatgacatcaacagtggtgctgtggaatgcccagccagttaa

SEQ ID NO: 122 - DNA, 615 bp, Homo sapiens
atgggtgcatacaagtacatccaggagctatggagaaagaagcagtctgatgtcatgcgctttcttctgagggtccgctgctggcagtaccgccagctctctgctctccacagggctccccgccccacccggcctgataaagcgcgccgactgggctacaaggccaagcaaggttacgttatatataggattcgtgttcgccgtggtggccgaaaacgcccagttcctaagggtgcaacttacggcaagcctgtccatcatggtgttaaccagctaaagtttgctcgaagccttcagtccgttgcagaggagcgagctggacgccactgtggggctctgagagtcctgaattcttactgggttggtgaagattccacatacaaattttttgaggttatcctcattgatccattccataaagctatcagaagaaatcctgacacccagtggatcaccaaaccagtccacaagcacagggagatgcgtgggctgacatctgcaggccgaaagagccgtggccttggaaagggccacaagttccaccacactattggtggctctcgccgggcagcttggagaaggcgcaatactctccagctccaccgttaccgctaa

SEQ ID NO: 123 - DNA, 387 bp, Homo sapiens
atggctcctgtgaaaaagcttgtggtgaaggggggcaaaaaaaagaagcaagttctgaagttcactcttgattgcacccaccctgtagaagatggaatcatggatgctgccaattttgagcagtttttgcaagaaaggatcaaagtgaacggaaaagctgggaaccttggtggaggggtggtgaccatcgaaaggagcaagagcaagatcaccgtgacatccgaggtgcctttctccaaaaggtatttgaaatatctcaccaaaaaatatttgaagaagaataatctacgtgactggttgcgcgtagttgctaacagcaaagagagttacgaattacgttacttccagattaaccaggacgaagaagaggaggaagacgaggattaa

SEQ ID NO: 124 - DNA, 411 bp, Homo sapiens
atgggcaagttcatgaaacctgggaaggtggtgcttgtcctggctggacgctactccggacgcaaagctgtcatcgtgaagaacattgatgatggcacctcagatcgcccctacagccatgctctggtggctggaattgaccgctacccccgcaaagtgacagctgccatgggcaagaagaagatcgccaagagatcaaagataaaatcttttgtgaaagtgtataactacaatcacctaatgcccacaaggtactctgtggatatccccttggacaaaactgtcgtcaataaggatgtcttcagagatcctgctcttaaacgcaaggcccgacgggaggccaaggtcaagtttgaagagagatacaagacaggcaagaacaagtggttcttccagaaactgcggttttag

SEQ ID NO: 125 - DNA, 348 bp, Homo sapiens
atggtggccgcaaagaagacgaaaaagtcgctggagtcgatcaactctaggctccaactcgttatgaaaagtgggaagtacgtcctggggtacaagcagactctgaagatgatcagacaaggcaaagcgaaattggtcattctcgctaacaactgcccagctttgaggaaatctgaaatagagtactatgctatgttggctaaaactggtgtccatcactacagtggcaataatattgaactgggcacagcatgcggaaaatactacagagtgtgcacactggctatcattgatccaggtgactctgacatcattagaagcatgccagaacagactggtgaaaagtaa

SEQ ID NO: 126 - DNA, 318 bp, Homo sapiens
atggccctacgctaccctatggccgtgggcctcaacaagggccacaaagtgaccaagaacgtgagcaagcccaggcacagccgacgccgcgggcgtctgaccaaacacaccaagttcgtgcgggacatgattcgggaggtgtgtggctttgccccgtacgagcggcgcgccatggagttactgaaggtctccaaggacaaacgggccctcaaatttatcaagaaaagggtggggacgcacatccgcgccaagaggaagcgggaggagctgagcaacgtactggccgccatgaggaaagctgctgccaagaaagactga

SEQ ID NO: 127 - DNA, 213 bp, Homo sapiens
atgcctcggaaaattgaggaaatcaaggacttcctgctcacagcccgacgaaaggatgccaaatctgtcaagatcaagaaaaataaggacaacgtgaagtttaaagttcgatgcagcagatacctttacaccctggtcatcactgacaaagagaaggcagagaaactgaagcagtccctgccccccggtttggcagtgaaggaactgaaatga

SEQ ID NO: 128 - DNA, 774 bp, Homo sapiens
atgggccgtgtgatccgtggacagaggaagggcgccgggtctgtgttccgcgcgcacgtgaagcaccgtaaaggcgctgcgcgcctgcgcgccgtggatttcgctgagcggcacggctacatcaagggcatcgtcaaggacatcatccacgacccgggccgcggcgcgcccctcgccaaggtggtcttccgggatccgtatcggtttaagaagcggacggagctgttcattgccgccgagggcattcacacgggccagtttgtgtattgcggcaagaaggcccagctcaacattggcaatgtgctccctgtgggcaccatgcctgagggtacaatcgtgtgctgcctggaggagaagcctggagaccgtggcaagctggcccgggcatcagggaactatgccaccgttatctcccacaaccctgagaccaagaagacccgtgtgaagctgccctccggctccaagaaggttatctcctcagccaacagagctgtggttggtgtggtggctggaggtggccgaattgacaaacccatcttgaaggctggccgggcgtaccacaaatataaggcaaagaggaactgctggccacgagtacggggtgtggccatgaatcctgtggagcatccttttggaggtggcaaccaccagcacatcggcaagccctccaccatccgcagagatgcccctgctggccgcaaagtgggtctcattgctgcccgccggactggacgtctccggggaaccaagactgtgcaggagaaagagaactag

SEQ ID NO: 129 - DNA, 477 bp, Homo sapiens
atggcggacattcagactgagcgtgcctaccaaaagcagccgaccatctttcaaaacaagaagagggtcctgctgggagaaactggcaaggagaagctcccgcggtactacaagaacatcggtctgggcttcaagacacccaaggaggctattgagggcacctacattgacaagaaatgccccttcactggtaatgtgtccattcgagggcggatcctctctggcgtggtgaccaagatgaagatgcagaggaccattgtcatccgccgagactatctgcactacatccgcaagtacaaccgcttcgagaagcgccacaagaacatgtctgtacacctgtccccctgcttcagggacgtccagatcggtgacatcgtcacagtgggcgagtgccggcctctgagcaagacagtgcgcttcaacgtgctcaaggtcaccaaggctgccggcaccaagaagcagttccagaagttctga

SEQ ID NO: 130 - DNA, 615 bp, Homo sapiens
atgaccgagtgggagacagcagcaccagcggtggcagagaccccagacatcaagctctttgggaagtggagcaccgatgatgtgcagatcaatgacatttccctgcaggattacattgcagtgaaggagaagtatgccaagtacctgcctcacagtgcagggcggtatgccgccaaacgcttccgcaaagctcagtgtcccattgtggagcgcctcactaactccatgatgatgcacggccgcaacaacggcaagaagctcatgactgtgcgcatcgtcaagcatgccttcgagatcatacacctgctcacaggcgagaaccctctgcaggtcctggtgaacgccatcatcaacagtggtccccgggaggactccacacgcattgggcgcgccgggactgtgagacgacaggctgtggatgtgtcccccctgcgccgtgtgaaccaggccatctggctgctgtgcacaggcgctcgtgaggctgccttccggaacattaagaccattgctgagtgcctggcagatgagctcatcaatgctgccaagggctcctcgaactcctatgccattaagaagaaggacgagctggagcgtgtggccaagtccaaccgctga

SEQ ID NO: 131 - DNA, 585 bp, Homo sapiens
atgccagtggcccggagctgggtttgtcgcaaaacttatgtgaccccgcggagacccttcgagaaatctcgtctcgaccaagagctgaagctgatcggcgagtatgggctccggaacaaacgtgaggtctggagggtcaaatttaccctggccaagatccgcaaggccgcccgggaactgctgacgcttgatgagaaggacccacggcgtctgttcgaaggcaacgccctgctgcggcggctggtccgcattggggtgctggatgagggcaagatgaagctggattacatcctgggcctgaagatagaggatttcttagagagacgcctgcagacccaggtcttcaagctgggcttggccaagtccatccaccacgctcgcgtgctgatccgccagcgccatatcagggtccgcaagcaggtggtgaacatcccgtccttcattgtccgcctggattcccagaagcacattgacttctctctgcgctctccctacgggggtggccgcccgggccgcgtgaagaggaagaatgccaagaagggccagggtggggctggggctggagacgacgaggaggaggattaa

SEQ ID NO: 132 - DNA, 1248 bp, Homo sapiens
atgcgtattcccgtagacccaagcaccagccgccgcttcacacctccctccccggccttcccctgcggcggcggcggcggcaagatgggcgagaacagcggcgcgctgagcgcgcaggcggccgtggggcccggagggcgcgcccggcccgaggtgcgctcgatggtggacgtgctggcggaccacgcaggcgagctcgtgcgcaccgacagccccaacttcctctgctccgtgctgccctcgcactggcgctgcaacaagacgctgcccgtcgccttcaaggtggtggcattgggggacgtgccggatggtacggtggtgactgtgatggcaggcaatgacgagaactactccgctgagctgcgcaatgcctcggccgtcatgaagaaccaggtggccaggttcaacgaccttcgcttcgtgggccgcagtgggcgagggaagagtttcaccctgaccatcactgtgttcaccaaccccacccaagtggcgacctaccaccgagccatcaaggtgaccgtggacggaccccgggagcccagacggcaccggcagaagctggaggaccagaccaagccgttccctgaccgctttggggacctggaacggctgcgcatgcgggtgacaccgagcacacccagcccccgaggctcactcagcaccacaagccacttcagcagccagccccagaccccaatccaaggcacctcggaactgaacccattctccgacccccgccagtttgaccgctccttccccacgctgccaaccctcacggagagccgcttcccagaccccaggatgcattatcccggggccatgtcagctgccttcccctacagcgccacgccctcgggcacgagcatcagcagcctcagcgtggcgggcatgccggccaccagccgcttccaccatacctacctcccgccaccctacccgggggccccgcagaaccagagcgggcccttccaggccaacccgtccccctaccacctctactacgggacatcctctggctcctaccagttctccatggtggccggcagcagcagtgggggcgaccgctcacctacccgcatgctggcctcttgcaccagcagcgctgcctctgtcgccgccggcaacctcatgaaccccagcctgggcggccagagtgatggcgtggaggccgacggcagccacagcaactcacccacggccctgagcacgccaggccgcatggatgaggccgtgtggcggccctactga

SEQ ID NO: 133 - DNA, 1077 bp, Homo sapiens
atgcccggctgcgagctgcccgtgggcacctgcccggacatgtgcccggccgccgagcgcgcccagcgcgaaagggagcaccgcctgcaccgcttggaggtggtgccgggttgccgccaggacccgccccgcgcggatccgcagcgcgcggtgaaggagtacagccgacccgccgccggcaagccccggcccccgcccagccagttgcgtccgccctccgtgctgctggccaccgtgcgctacctggccggtgaggtggcggagagcgccgacatcgcccgcgccgaggtggccagcttcgtggcagaccgcttgcgagctgtgctcctggacctggcgctgcagggagcgggcgacgccgaggcagctgtggtgctggaggcggcgctggccacgctgctgaccgtagtggcgcggctcgggcccgacgcggcgcggggacccgcggacccggtgctgctgcaggcccaggtgcaggagggcttcggctcgctgcggcgctgctacgcgcggggcgccgggccgcacccccgccaacccgccttccagggcctctttctgctctataacctgggctcggtggaagccctgcatgaggttctacagctgcctgctgccctgcgcgcctgcccgcccctccgcaaggccttggcggtagatgctgccttccgagagggcaatgctgcccgcctgttccgtctgctccagaccctgccctacctgccaagttgcgctgtgcagtgccatgtgggccatgcccgccgggaagccctggcccgcttcgctcgtgcctttagcacccccaagggccagaccttgcctctgggcttcatggtcaacctcttggccctggatggactcagggaagcacgggacctgtgccaggcccacgggctgcccttggacggagaggagagagttgtgttcctgaggggtcgctacgtggaggaagggctaccgcctgccagtacgtgcaaggtgttagtggagagcaaacttcgaggacgtaccctggaggaggtggtcatggcagaggaggaagatgagggcacggacagacctgggtccccagcctga

SEQ ID NO: 134 - DNA, 2292 bp, Homo sapiens
atggatcatttgaacgaggcaactcaggggaaagaacattcagaaatgtctaacaatgtgagtgatccgaagggtccaccagccaagattgcccgcctggagcagaacgggagcccgctaggaagaggaaggcttgggagtacaggtgcaaaaatgcagggagtgcctttaaaacactcgggccatctgatgaaaaccaaccttaggaaaggaaccatgctgccagttttctgtgtggtggaacattatgaaaacgccattgaatatgattgcaaggaggagcatgcagaatttgtgctggtgagaaaggatatgcttttcaaccagctgatcgaaatggcattgctgtctctaggttattcacatagctctgctgcccaggccaaagggctaatccaggttggaaagtggaatccagttccactgtcttacgtgacagatgcccctgatgctacagtagcagatatgcttcaagatgtgtatcatgtggtcacattgaaaattcagttacacagttgccccaaactagaagacttgcctcccgaacaatggtcgcacaccacagtgaggaatgctctgaaggacttactgaaagatatgaatcagagttcattggccaaggagtgccccctttcacagagtatgatttcttccattgtgaacagtacttactatgcaaatgtctcagcagcaaaatgtcaagaatttggaaggtggtacaaacatttcaagaagacaaaagatatgatggttgaaatggatagtctttctgagctatcccagcaaggcgccaatcatgtcaattttggccagcaaccagttccagggaacacagccgagcagcctccatcccctgcgcagctctcccatggcagccagccctctgtccggacacctcttccaaacctgcaccctgggctcgtatcaacacctatcagtcctcaattggtcaaccagcagctggtgatggctcagctgctgaaccagcagtatgcagtgaatagacttttagcccagcagtccttaaaccaacaatacttgaaccaccctccccctgtcagtagatctatgaataagcctttggagcaacaggtttcgaccaacacagaggtgtcttccgaaatctaccagtgggtacgcgatgaactgaaacgagcaggaatctcccaggcggtatttgcacgtgtggcttttaacagaactcagggcttgctttcagaaatcctccgaaaggaagaggaccccaagactgcatcccagtctttgctggtaaaccttcgggctatgcagaatttcttgcagttaccggaagctgaaagagaccgaatataccaggacgaaagggaaaggagcttgaatgctgcctcggccatgggtcctgcccccctcatcagcacaccacccagccgtcctccccaggtgaaaacagctactattgccactgaaaggaatgggaaaccagagaacaataccatgaacattaatgcttccatttatgatgagattcagcaggaaatgaagcgtgctaaagtgtctcaagcactgtttgcaaaggttgcagcaaccaaaagccagggatggttgtgcgagctgttacgctggaaagaagatccttctccagaaaacagaaccctgtgggagaacctctccatgatccgaaggttcctcagtcttcctcagccagaacgtgatgccatttatgaacaggagagcaacgcggtgcatcaccatggcgacaggccgccccacattatccatgttccagcagagcagattcagcaacagcagcagcaacagcaacagcagcagcagcagcagcaggcaccgccgcctccacagccacagcagcagccacagacaggccctcggctccccccacggcaacccacggtggcctctccagcagagtcagatgaggaaaaccgacagaagacccggccacgaacaaaaatttcagtggaagccttgggaatcctccagagtttcatacaagacgtgggcctgtaccctgacgaagaggccatccagactctgtctgcccagctcgaccttcccaagtacaccatcatcaagttctttcagaaccagcggtactatctcaagcaccacggcaaactgaaggacaattccggtttagaggtcgatgtggcagaatataaagaagaggagctgctgaaggatttggaagagagtgtccaagataaaaatactaacacccttttttcagtgaaactagaagaagagctgtcagtggaaggaaacacagacattaatactgatttgaaagactga

SEQ ID NO: 135 - DNA, 1164 bp, Homo sapiens
atgcctgggcacttacaggaaggcttcggctgcgtggtcaccaaccgattcgaccagttatttgacgacgaatcggaccccttcgaggtgctgaaggcagcagagaacaagaaaaaagaagccggcgggggcggcgttgggggccctggggccaagagcgcagctcaggccgcggcccagaccaactccaacgcggcaggcaaacagctgcgcaaggagtcccagaaagaccgcaagaacccgctgccccccagcgttggcgtggttgacaagaaagaggagacgcagccgcccgtggcgcttaagaaagaaggaataagacgagttggaagaagacctgatcaacaacttcagggtgaagggaaaataattgatagaagaccagaaaggcgaccacctcgtgaacgaagattcgaaaagccacttgaagaaaagggtgaaggaggcgaattttcagttgatagaccgattattgaccgacctattcgaggtcgtggtggtcttggaagaggtcgagggggccgtggacgtggaatgggccgaggagatggatttgattctcgtggcaaacgtgaatttgataggcatagtggaagtgatagatctggcctgaagcacgaggacaaacgtggaggtagcggatctcacaactggggaactgtcaaagacgaattaactgacttggatcaatcaaatgtgactgaggaaacacctgaaggtgaagaacatcatccagtggcagacactgaaaataaggagaatgaagttgaagaggtaaaagaggagggtccaaaagagatgactttggatgagtggaaggctattcaaaataaggaccgggcaaaagtagaatttaatatccgaaaaccaaatgaaggtgctgatgggcagtggaagaagggatttgttcttcataaatcaaagagtgaagaggctcatgctgaagattcggttatggaccatcatttccggaagccagcaaatgatataacgtctcagctggagatcaattttggagaccttggccgcccaggacgtggcggcaggggaggacgaggtggacgtgggcgtggtgggcgcccaaaccgtggcagcaggaccgacaagtcaagtgcttctgctcctgatgtggatgacccagaggcattcccagctctggcttaa

SEQ ID NO: 136 - DNA, 1197 bp, Homo sapiens
atgaactggcatctccccctcttcctcttggcctctgtgacgctgccttccatctgctcccacttcaatcctctgtctctcgaggaactaggctccaacacggggatccaggttttcaatcagattgtgaagtcgaggcctcatgacaacatcgtgatctctccccatgggattgcgtcggtcctggggatgcttcagctgggggcggacggcaggaccaagaagcagctcgccatggtgatgagatacggcgtaaatggagttggtaaaatattaaagaagatcaacaaggccatcgtctccaagaagaataaagacattgtgacagtggctaacgccgtgtttgttaagaatgcctctgaaattgaagtgccttttgttacaaggaacaaagatgtgttccagtgtgaggtccggaatgtgaactttgaggatccagcctctgcctgtgattccatcaatgcatgggttaaaaatgaaaccagggatatgattgacaatctgctgtccccagatcttattgatggtgtgctcaccagactggtcctcgtcaacgcagtgtatttcaagggtctgtggaaatcacggttccaacccgagaacacaaagaaacgcactttcgtggcagccgacgggaaatcctatcaagtgccaatgctggcccagctctccgtgttccggtgtgggtcgacaagtgcccccaatgatttatggtacaacttcattgaactgccctaccacggggaaagcatcagcatgctgattgcactgccgactgagagctccactccgctgtctgccatcatcccacacatcagcaccaagaccatagacagctggatgagcatcatggtgcccaagagggtgcaggtgatcctgcccaagttcacagctgtagcacaaacagatttgaaggagccgctgaaagttcttggcattactgacatgtttgattcatcaaaggcaaattttgcaaaaataacaacagggtcagaaaacctccatgtttctcatatcttgcaaaaagcaaaaattgaagtcagtgaagatggaaccaaagcttcagcagcaacaactgcaattctcattgcaagatcatcgcctccctggtttatagtagacagaccttttctgtttttcatccgacataatcctacaggtgctgtgttattcatggggcagataaacaaaccctga

SEQ ID NO: 137 - DNA, 945 bp, Homo sapiens
atgttgggtaaaggaggaaaacggaagtttgatgagcatgaagatgggctggaaggcaaaatcgtgtctccctgtgacggtccatccaaggtgtcttacaccttacagcgccagactatcttcaacatttcccttatgaaactctataaccacaggcccctgacagagcccagcttgcaaaagaccgttttaattaacaacatgttgaggcggatccaggaggaactcaaacaggaaggcagcctgaggcccatgttcaccccctcctcccagcccaccaccgagcccagcgacagctaccgagaggccccgccggccttcagccacctggcgtccccgtcctcccacccctgcgacctcggaagcactacgcccctggaggcctgcctcaccccggcctcactgctcgaggacgacgatgacacgttttgcacctcccaggccatgcagcccacggctcccaccaaactgtcacctccagccctcttgccagaaaaggacagtttctcctctgccttggacgagatcgaggagctctgtcccacatctacctccacagaggcggccacggctgcgactgacagtgtgaaagggacctccagcgaggctggcacccagaaactcgacggtcctcaagagagccgcgcagatgactcaaaactgatggactctctgcctgggaattttgaaataacgacgtccacgggtttcctgacagacttgaccctggatgacatcctgtttgctgacattgatacgtccatgtatgattttgacccctgcacttcctcatcagggacagcctcaaaaatggcccctgtgtctgccgacgacctcctcaaaactctggctccttacagcagtcagcctgtcaccccaagtcagcctttcaaaatggacctcacagagctggaccacatcatggaggtgcttgttgggtcctaa

SEQ ID NO: 138 - DNA, 1008 bp, Homo sapiens
atggctggttccccaacatgcctcaccctcatctatatcctttggcagctcacagggtcagcagcctctggacccgtgaaagagctggtcggttccgttggtggggccgtgactttccccctgaagtccaaagtaaagcaagttgactctattgtctggaccttcaacacaacccctcttgtcaccatacagccagaagggggcactatcatagtgacccaaaatcgtaatagggagagagtagacttcccagatggaggctactccctgaagctcagcaaactgaagaagaatgactcagggatctactatgtggggatatacagctcatcactccagcagccctccacccaggagtacgtgctgcatgtctacgagcacctgtcaaagcctaaagtcaccatgggtctgcagagcaataagaatggcacctgtgtgaccaatctgacatgctgcatggaacatggggaagaggatgtgatttatacctggaaggccctggggcaagcagccaatgagtcccataatgggtccatcctccccatctcctggagatggggagaaagtgatatgaccttcatctgcgttgccaggaaccctgtcagcagaaacttctcaagccccatccttgccaggaagctctgtgaaggtgctgctgatgacccagattcctccatggtcctcctgtgtctcctgttggtgcccctcctgctcagtctctttgtactggggctatttctttggtttctgaagagagagagacaagaagagtacattgaagagaagaagagagtggacatttgtcgggaaactcctaacatatgcccccattctggagagaacacagagtacgacacaatccctcacactaatagaacaatcctaaaggaagatccagcaaatacggtttactccactgtggaaataccgaaaaagatggaaaatccccactcactgctcacgatgccagacacaccaaggctatttgcctatgagaatgttatctag

SEQ ID NO: 139 - DNA, 1908 bp, Homo sapiens
atgagtgtaggggtgagcacctcagcccctctttccccaacctcgggcacaagcgtgggcatgtctaccttctccatcatggactatgtggtgttcgtcctgctgctggttctctctcttgccattgggctctaccatgcttgtcgtggctggggccggcatactgttggtgagctgctgatggcggaccgcaaaatgggctgccttccggtggcactgtccctgctggccaccttccagtcagccgtggccatcctgggtgtgccgtcagagatctaccgatttgggacccaatattggttcctgggctgctgctactttctggggctgctgatacctgcacacatcttcatccccgttttctaccgcctgcatctcaccagtgcctatgagtacctggagcttcgattcaataaaactgtgcgagtgtgtggaactgtgaccttcatctttcagatggtgatctacatgggagttgtgctctatgctccgtcattggctctcaatgcagtgactggctttgatctgtggctgtccgtgctggccctgggcattgtctgtaccgtctatacagctctgggtgggctgaaggccgtcatctggacagatgtgttccagacactggtcatgttcctcgggcagctggcagttatcattgtggggtcagccaaggtgggcggcttggggcgtgtgtgggccgtggcttcccagcacggccgcatctctgggtttgagctggatccagacccctttgtgcggcacaccttctggaccttggccttcgggggtgtcttcatgatgctctccttatacggggtgaaccaggctcaggtgcagcggtacctcagttcccgcacggagaaggctgctgtgctctcctgttatgcagtgttccccttccagcaggtgtccctctgcgtgggctgcctcattggcctggtcatgttcgcgtattaccaggagtatcccatgagcattcagcaggctcaggcagccccagaccagttcgtcctgtactttgtgatggatctcctgaagggcctgccaggcctgccagggctcttcattgcctgcctcttcagcggctctctcagcactatatcctctgcttttaattcattggcaactgttacgatggaagacctgattcgaccttggttccctgagttctctgaagcccgggccatcatgctttccagaggccttgcctttggctatgggctgctttgtctaggaatggcctatatttcctcccagatgggacctgtgctgcaggcagcaatcagcatctttggcatggttgggggaccgctgctgggactcttctgccttggaatgttctttccatgtgctaaccctcctggtgctgttgtgggcctgttggctgggctcgtcatggccttctggattggcatcgggagcatcgtgaccagcatgggctccagcatgccaccctctccctctaatgggtccagcttctccctgcccaccaatctaaccgttgccactgtgaccacactgatgcccttgactaccttctccaagcccacagggctgcagcggttctattccttgtcttacttatggtacagtgctcacaactccaccacagtgattgtggtgggcctgattgtcagtctactcactgggagaatgcgaggccggtccctgaaccctgcaaccatttacccagtgttgccaaagctcctgtccctccttccgttgtcctgtcagaagcggctccactgcaggagctacggccaggaccacctcgacactggcctgtttcctgagaagccgaggaatggtgtgctgggggacagcagagacaaggaggccatggccctggatggcacagcctatcaggggagcagctccacctgcatcctccaggagacctccctgtga

SEQ ID NO: 140 - DNA, 759 bp, Homo sapiens
atggcgcagctgtgcgggctgaggcggagccgggcgtttctcgccctgctgggatcgctgctcctctctggggtcctggcggccgaccgagaacgcagcatccacgacttctgcctggtgtcgaaggtggtgggcagatgccgggcctccatgcctaggtggtggtacaatgtcactgacggatcctgccagctgtttgtgtatgggggctgtgacggaaacagcaataattacctgaccaaggaggagtgcctcaagaaatgtgccactgtcacagagaatgccacgggtgacctggccaccagcaggaatgcagcggattcctctgtcccaagtgctcccagaaggcaggattctgaagaccactccagcgatatgttcaactatgaagaatactgcaccgccaacgcagtcactgggccttgccgtgcatccttcccacgctggtactttgacgtggagaggaactcctgcaataacttcatctatggaggctgccggggcaataagaacagctaccgctctgaggaggcctgcatgctccgctgcttccgccagcaggagaatcctcccctgccccttggctcaaaggtggtggttctggcggggctgttcgtgatggtgttgatcctcttcctgggagcctccatggtctacctgatccgggtggcacggaggaaccaggagcgtgccctgcgcaccgtctggagctccggagatgacaaggagcagctggtgaagaacacatatgtcctgtga

SEQ ID NO: 141 - DNA, 1353 bp, Homo sapiens
atggtgccactggtggctgtggtatcagggccccgtgcccagctctttgcctgcctgctcaggctgggcactcagcaggtcggcccccttcagctgcacaccggggccagccatgcggccaggaaccattatgaggtgctggtgctgggtgggggcagtggcggaatcaccatggctgcccgcatgaagaggaaagtgggtgcagagaatgtggccattgttgagcccagtgagagacatttctaccagccaatctggacactggtgggtgctggtgccaaacaattgtcctcatctggtcgtcccacggcaagtgtgattccatctggtgtagaatggatcaaagctagagtgactgagttgaacccagacaagaactgcattcacacagatgacgacgagaagatctcctaccgatatcttattattgctctcggaatccagctggactatgagaagattaaaggcctacctgaaggtttcgctcatcccaaaatagggtcgaattattcagttaagactgtagagaagacatggaaagctctgcaggacttcaaagagggcaatgccatcttcaccttcccaaatactccagtgaagtgtgctggagcccctcagaagatcatgtacttatcagaagcctacttcaggaagacagggaagcgatccaaggccaatatcattttcaacacttctcttggagccattttcggggttaagaagtatgcagatgccctgcaggagatcatccaggagcggaacctcactgttaactacaagaaaaacctcattgaagtccgagccgataaacaagaggctgtatttgagaacctggacaaaccaggagagacccaagtgatttcatatgaaatgcttcatgtcacacctccaatgagcccaccagatgtcctcaagaccagtcctgtggctgatgctgctggttgggtggatgtggataaagaaactctgcaacacaggaggtacccaaatgtgtttgggattggggactgcaccaaccttcctacgtcaaagaccgctgctgcagtagctgcccagtcaggaatacttgataggacaatttctgtaattatgaagaatcaaacaccaacaaagaagtatgatggctacacatcatgtccactggtgaccggctacaaccgtgtgattcttgctgagtttgactacaaagcagagccgctagaaaccttcccctttgatcaaagcaaagagcgcctttccatgtatctcatgaaagctgacctgatgcctttcctgtattggaatatgatgctaaggggttactggggaggaccagcgtttctgcgcaagttgtttcatctaggtatgagttaa

SEQ ID NO: 142 - DNA, 3444 bp, Homo sapiens
atggacgagccacccttcagcgaggcggctttggagcaggcgctgggcgagccgtgcgatctggacgcggcgctgctgaccgacatcgaagacatgcttcagcttatcaacaaccaagacagtgacttccctggcctatttgacccaccctatgctgggagtggggcagggggcacagaccctgccagccccgataccagctccccaggcagcttgtctccacctcctgccacattgagctcctctcttgaagccttcctgagcgggccgcaggcagcgccctcacccctgtcccctccccagcctgcacccactccattgaagatgtacccgtccatgcccgctttctcccctgggcctggtatcaaggaagagtcagtgccactgagcatcctgcagacccccaccccacagcccctgccaggggccctcctgccacagagcttcccagccccagccccaccgcagttcagctccacccctgtgttaggctaccccagccctccgggaggcttctctacaggaagccctcccgggaacacccagcagccgctgcctggcctgccactggcttccccgccaggggtcccgcccgtctccttgcacacccaggtccagagtgtggtcccccagcagctactgacagtcacagctgcccccacggcagcccctgtaacgaccactgtgacctcgcagatccagcaggtcccggtcctgctgcagccccacttcatcaaggcagactcgctgcttctgacagccatgaagacagacggagccactgtgaaggcggcaggtctcagtcccctggtctctggcaccactgtgcagacagggcctttgccgaccctggtgagtggcggaaccatcttggcaacagtcccactggtcgtagatgcggagaagctgcctatcaaccggctcgcagctggcagcaaggccccggcctctgcccagagccgtggagagaagcgcacagcccacaacgccattgagaagcgctaccgctcctccatcaatgacaaaatcattgagctcaaggatctggtggtgggcactgaggcaaagctgaataaatctgctgtcttgcgcaaggccatcgactacattcgctttctgcaacacagcaaccagaaactcaagcaggagaacctaagtctgcgcactgctgtccacaaaagcaaatctctgaaggatctggtgtcggcctgtggcagtggagggaacacagacgtgctcatggagggcgtgaagactgaggtggaggacacactgaccccacccccctcggatgctggctcacctttccagagcagccccttgtcccttggcagcaggggcagtggcagcggtggcagtggcagtgactcggagcctgacagcccagtctttgaggacagcaaggcaaagccagagcagcggccgtctctgcacagccggggcatgctggaccgctcccgcctggccctgtgcacgctcgtcttcctctgcctgtcctgcaaccccttggcctccttgctgggggcccgggggcttcccagcccctcagataccaccagcgtctaccatagccctgggcgcaacgtgctgggcaccgagagcagagatggccctggctgggcccagtggctgctgcccccagtggtctggctgctcaatgggctgttggtgctcgtctccttggtgcttctctttgtctacggtgagccagtcacacggccccactcaggccccgccgtgtacttctggaggcatcgcaagcaggctgacctggacctggcccggggagactttgcccaggctgcccagcagctgtggctggccctgcgggcactgggccggcccctgcccacctcccacctggacctggcttgtagcctcctctggaacctcatccgtcacctgctgcagcgtctctgggtgggccgctggctggcaggccgggcagggggcctgcagcaggactgtgctctgcgagtggatgctagcgccagcgcccgagacgcagccctggtctaccataagctgcaccagctgcacaccatggggaagcacacaggcgggcacctcactgccaccaacctggcgctgagtgccctgaacctggcagagtgtgcaggggatgccgtgtctgtggcgacgctggccgagatctatgtggcggctgcattgagagtgaagaccagtctcccacgggccttgcattttctgacacgcttcttcctgagcagtgcccgccaggcctgcctggcacagagtggctcagtgcctcctgccatgcagtggctctgccaccccgtgggccaccgtttcttcgtggatggggactggtccgtgctcagtaccccatgggagagcctgtacagcttggccgggaacccagtggaccccctggcccaggtgactcagctattccgggaacatctcttagagcgagcactgaactgtgtgacccagcccaaccccagccctgggtcagctgatggggacaaggaattctcggatgccctcgggtacctgcagctgctgaacagctgttctgatgctgcgggggctcctgcctacagcttctccatcagttccagcatggccaccaccaccggcgtagacccggtggccaagtggtgggcctctctgacagctgtggtgatccactggctgcggcgggatgaggaggcggctgagcggctgtgcccgctggtggagcacctgccccgggtgctgcaggagtctgagagacccctgcccagggcagctctgcactccttcaaggctgcccgggccctgctgggctgtgccaaggcagagtctggtccagccagcctgaccatctgtgagaaggccagtgggtacctgcaggacagcctggctaccacaccagccagcagctccattgacaaggccgtgcagctgttcctgtgtgacctgcttcttgtggtgcgcaccagcctgtggcggcagcagcagcccccggccccggccccagcagcccagggcaccagcagcaggccccaggcttccgcccttgagctgcgtggcttccaacgggacctgagcagcctgaggcggctggcacagagcttccggcccgccatgcggagggtgttcctacatgaggccacggcccggctgatggcgggggccagccccacacggacacaccagctcctcgaccgcagtctgaggcggcgggcaggccccggtggcaaaggaggcgcggtggcggagctggagccgcggcccacgcggcgggagcacgcggaggccttgctgctggcctcctgctacctgccccccggcttcctgtcggcgcccgggcagcgcgtgggcatgctggctgaggcggcgcgcacactcgagaagcttggcgatcgccggctgctgcacgactgtcagcagatgctcatgcgcctgggcggtgggaccactgtcacttccagctag

SEQ ID NO: 143 - DNA, 909 bp, Homo sapiens
atggagcccggccccgacggccccgccgcctccggccccgccgccatccgcgagggctggttccgcgagacctgcagcctgtggcccggccaggccctgtcactgcaggtggagcagctgctccaccaccggcgctcgcgctaccaggacatcctcgtcttccgcagtaagacctatggcaacgtgctggtgttggacggtgtcatccagtgcacggagagagacgagttctcctaccaggagatgatcgccaacctgcctctctgcagccaccccaacccgcgaaaggtgctgatcatcgggggcggagatggaggtgtcctgcgggaggtggtgaagcacccctccgtggagtccgtggtccagtgtgagatcgacgaggatgtcatccaagtctccaagaagttcctgccaggcatggccattggctactctagctcgaagctgaccctacatgtgggtgacggttttgagttcatgaaacagaatcaggatgccttcgacgtgatcatcactgactcctcagaccccatgggccccgccgaaagtctcttcaaggagtcctattaccagctcatgaagacagccctcaaggaagatggtgtcctctgctgccagggcgagtgccagtggctgcacctggacctcatcaaggagatgcggcagttctgccagtccctgttccccgtggtggcctatgcctactgcaccatccccacctaccccagcggccagatcggcttcatgctgtgcagcaagaacccgagcacgaacttccaggagccggtgcagccgctgacacagcagcaggtggcgcagatgcagctgaagtactacaactccgacgtgcaccgcgccgcctttgtgctgcccgagtttgcccgcaaggccctgaatgatgtgagctga

SEQ ID NO: 144 - DNA, 5367 bp, Homo sapiens
atgaaaagaaaagaaagaattgccaggcgcctggaagggattgaaaatgacactcagcccatcctcttgcagagctgcacaggattggtgactcaccgcctgctggaggaagacacccctcgatacatgagagccagcgaccctgccagcccccacatcggccgatcaaatgaagaggaggaaacttctgattcttctctagaaaagcaaactcgatccaaatactgcacagaaacctccggtgtccacggtgactcaccctatggttcgggtaccatggacacccacagtctggagtccaaagccgaaagaattgcaaggtacaaagcagaaagaaggcgacagctggcagagaagtatgggctgactctggatcccgaggccgactccgagtatttatcccgctataccaagtccaggaaggagcctgatgctgtcgagaagcggggaggaaaaagtgacaaacaggaagagtcaagcagagatgctagttctctgtaccccgggaccgagacgatggggctcaggacctgtgccggtgaatccaaggactatgccctccatgtgggtgacggctcttccgacccggaggtgctgctgaacatagaaaaccaaagacgaggtcaagagctgagtgccacccggcaggcccatgacctgtccccagcagccgagagttcctcgaccttctctttctctgggcgagactcctccttcactgaagtgccacggtcccccaagcacgcccacagctcctccctgcagcaggcagcctcccggagcccctcctttggtgacccacagctatcccctgaggcccgacccaggtgcacttcacattcagaaacgccaactgtcgatgatgaagaaaaggtggatgaacgagccaagctgagcgtcgccgccaagaggttgcttttcagggagatggaaaaatcttttgatgaacaaaatgttccaaagcgacgctcaagaaacacagctgtggagcagaggctacgccgtctgcaggacaggtccctcacccagcccatcaccactgaagaggtggtcatcgcagccacattgcaggcctctgctcaccaaaaggccttagccaaggaccagacaaatgagggcaaagagcttgctgagcaaggagaacctgattcctccactctaagcttggccgaaaagttggccttgtttaacaaattgtcccagccagtctcaaaagcgatttctacccggaacagaatagacacgagacagaggagaatgaacgctcgctatcaaactcagccagtcacactgggagaggtggagcaggtgcagagtggaaagctcattcctttctcacctgccgtgaacacatcagtgtctaccgtagcatccacggttgctccaatgtatgccggagatcttcgcacaaagccacctcttgaccacaatgcaagtgccactgactataagttttcttcttcaatagaaaattcggactctccagttagaagcattctgaaatcgcaagcttggcagcctttggtagagggtagcgagaacaagggaatgttgagagaatatggagagacagaaagcaagagagctttgacaggtcgagacagtgggatggagaagtatgggtcctttgaggaagcagaagcatcctaccccatcctgaaccgagccagggaaggagacagccataaggaatctaaatatgctgttcccagaagaggaagcctggaacgggcgaaccctcccatcacccacctcggggatgaaccgaaggaattttccatggctaaaatgaatgcacaaggaaacttggacttgagggacaggctgccctttgaagagaaggtggaggtggagaatgttatgaaaaggaagttttcactaagagcggcagagttcggggagcccacttccgagcagacggggacagctgctgggaaaactattgctcaaaccacagcccccgtgtcctggaagccccaggattcttcggaacagccacaggagaagctctgcaagaatccatgtgcgatgtttgctgctggagagatcaaaacgccgacaggggagggccttcttgactcacccagcaaaaccatgtctattaaagaaagattggcactgttgaagaaaagcggggaggaagattggagaaacagactcagcaggaggcaggagggcggcaaggcgccggccagcagcctgcacacccaggaagcagggcggtccctcatcaagaagcgggtcacagaaagtcgagagagccaaatgacgattgaggagaggaagcagctcatcactgtgagagaggaggcctggaagacgagaggcagaggagcggccaacgactcgacccagttcactgtggctggcaggatggtgaagaaaggtttggcgtcacctactgccataaccccagtagcctcacccatttgcggtaaaacaagaggcaccacacccgtttccaaacccctggaagatatcgaagccagaccagatatgcagttagaatcggacctgaagttggacaggctggaaacctttctaagaaggctgaataacaaagttggcgggatgcacgaaacggtgctcactgtcaccggcaaatctgtgaaggaggtgatgaagccagatgatgatgaaacctttgccaaattttaccgcagcgtggattataatatgccaagaagtcctgtggagatggatgaggacttcgatgtcattttcgatccttatgcacccaaattgacgtcttccgtggccgagcacaagcgggcagttaggcccaagcgccgggttcaggcctccaaaaaccccctgaaaatgctggcggcaagagaagatctccttcaggaatacactgagcagagattaaacgttgccttcatggagtcaaagcggatgaaagtagaaaagatgtcttccaactccaacttctcagaagtcaccctggcgggtttagccagtaaagaaaacttcagcaacgtcagcctgcggagcgtcaacctgacggaacagaactctaacaacagcgccgtgccctacaagaggctgatgctgttgcagattaaaggaagaagacatgtgcagaccaggctggtggaacctcgagcttcggcgctcaacagtggggactgcttcctcctgctctctccccactgctgcttcctgtgggtaggagagtttgcaaacgtcatagaaaaggcgaaggcctcagaacttgcaactttaattcagacaaagagggaacttggttgtagagctacttatatccaaaccattgaagaaggaattaatacacacactcatgcagccaaagacttctggaagcttctgggtggccaaaccagttaccaatctgctggagacccaaaagaagatgaactctatgaagcagccataatagaaactaactgcatttaccgtctcatggatgacaaacttgttcctgatgacgactactgggggaaaattccgaagtgctcccttctgcaacccaaagaggtactggtgtttgattttggtagtgaagtttacgtatggcatgggaaagaagtcacattagcacaacgaaaaatagcatttcagctggcaaagcacttatggaatggaacctttgactatgagaactgtgacatcaatcccctggatcctggagaatgcaatccgcttatccccagaaaaggacaggggcggcccgactgggcgatatttgggagacttactgaacacaatgagacgattttgttcaaagagaagtttctggattggacggaactgaagagatcgaatgagaagaaccccggggaacttgcccagcacaaggaagaccccaggactgatgtcaaggcatacgatgtgacacggatggtgtccatgccccagacgacagcaggcaccatcctggacggagtgaacgtcggccgtggctatggcctggtggaaggacacgacaggaggcagtttgagatcaccagcgtttccgtggatgtctggcacatcctggaattcgactatagcaggctccccaaacaaagcatcgggcagttccatgagggggatgcctatgtggtcaagtggaagttcatggtgagcacggcagtgggaagtcgccagaagggagagcactcggtgagggcagccggcaaagagaagtgcgtctacttcttctggcaaggccggcactccaccgtgagtgagaagggcacgtcggcgctgatgacggtggagctggacgaggaaaggggggcccaggtccaggttctccagggaaaggagcccccctgtttcctgcagtgtttccagggggggatggtggtgcactcggggaggcgggaagaggaagaagaaaatgtgcaaagtgagtggcggctgtactgcgtgcgtggagaggtgcccgtggaagggaatttgctggaagtggcctgtcactgtagcagcctgaggtccagaacttccatggtggtgcttaacgtcaacaaggccctcatctacctgtggcacggatgcaaagcccaggcccacacgaaggaggtcggaaggaccgctgcgaacaagatcaaggaacaatgtcccctggaagcaggactgcatagtagcagcaaagtcacaatacacgagtgtgatgaaggctccgagccactcggattctgggatgccttaggaaggagagacaggaaagcctacgattgcatgcttcaagatcctggaagttttaacttcgcgccccgcctgttcatcctcagcagctcctctggggattttgcagccacagagtttgtgtaccctgcccgagccccctctgtggtcagttccatgcccttcctgcaggaagatctgtacagcgcgccccagccagcacttttccttgttgacaatcaccacgaggtgtacctctggcaaggctggtggcccatcgagaacaagatcactggttccgcccgcatccgctgggcctccgaccggaagagtgcgatggagactgtgctccagtactgcaaaggaaaaaatctcaagaaaccagcccccaagtcttaccttatccacgctggtctggagcccctgacattcaccaatatgtttcccagctgggagcacagagaggacatcgctgagatcacagagatggacacggaagtttccaatcagatcaccctcgtggaagacgtcttagccaagctctgtaaaaccatttacccgctggccgacctcctggccaggccactcccggagggggtcgatcctctgaagcttgagatctatctcaccgacgaagacttcgagtttgcactagacatgacgagggatgaatacaacgccctgcccgcctggaagcaggtgaacctgaagaaagcaaaaggcctgttctga

SEQ ID NO: 145 - DNA, 20658 bp, Homo sapiens
atggcatctagtcctgagcttcccaccgaagatgaacagggttcctggggcatcgacgatctccatatttcattgcaagctgaacaggaagacacccagaagaaagccttcacgtgctggataaactcacagttggccaggcacacttctccctcagttatatccgacctattcacagacattaaaaaggggcatgtcctcctggatctgctagaagtactttctgggcaacagttgcctcgggataaaggatctaataccttccagtgtagaatcaatatagaacatgccttgacattcctaagaaaccgatcaattaagctaataaatattcatgttactgatatcattgatggaaacccatccattatccttggcctaatttggacaattatcctgcactttcatattgagaagcttgcccagactctttcttgcaattacaatcagccttccctggatgatgtgagtgtggttgactcatctcctgcctcaagtcctccagctaagaaatgctctaaagtgcaagcaagatggcaaatgtctgcaagaaaggcccttcttttgtgggctcaggaacaatgcgccacctatgagtctgtcaatgtgaccgattttaagtcaagttggagaaatgggatggcttttttggccatcattcatgccttgcgaccagacctaattgacatgaagagtgtgaagcatagatccaacaaagacaatctgagagaggccttcagaattgcagaacaagaattaaaaatccccagattgctggaaccagaagatgtggatgttgttgatcctgatgaaaagtccatcatgacctatgtggcacagtttctgcagtattccaaagatgcccctgggactggagaggaggctcagggaaaggtgaaagatgctatgggctggttaactctgcaaaaggaaaaactacagaagttgctaaaggattcagagaatgatacctactttaaaaagtataatagcctgctgtcctttatggagtcattcaatgaagaaaaaaagtcctttttggatgtcctgtcaataaaacgggatctggatgagctggacaaggatcatttacagttgagagaagcctgggatggcctcgatcaccagattaatgcatggaaaataaagctaaattatgccttgcccccacccctccatcaaactgaagcttggctccaggaggtagaagagcttatggatgaagatttgtcagcctcccaggatcactctcaagccgtgactctgatacaagagaaaatgactttattcaagagcctgatggatagatttgagcatcattcgaacattctccttacctttgaaaataaggatgaaaatcacttgccattggtaccacctaacaaattggaggaaatgaaaagacgaatcaacaacattttggagaaaaaatttattctacttctagaatttcattactacaagtgcttagttcttggtttggtagatgaagtgaaatcaaaattggatatttggaacattaaatatgggagcagagaatctgtggaattattgctggaagactggcataaatttattgaagaaaaagaattcctagctcgacttgatacttcttttcaaaaatgtggagaaatttataagaatttggctggagaatgtcagaatattaataaacagtatatgatggtgaaatctgatgtttgtatgtatagaaaaaatatatataatgtgaagtccactctacaaaaagtgctggcatgttgggctacttatgtggaaaaccttcgcttactaagggcttgctttgaggagacaaagaaggaagaaattaaagaggtaccctttgagacactagcccagtggaatctagaacacgctactttaaatgaagcaggaaatttcttagtcgaagtcagcaatgatgtggttggatcatctatttctaaagaactgagaaggctgaataaaagatggagaaagttggtttcaaaaactcaacttgaaatgaacctgccactgatgataaaaaaacaggatcagcccacttttgacaattctggaaatattctatctaaagaagagaaagcaactgttgagttttcaacagatatgtcagtagaacttcctgaaaattataatcaaaatataaaggctggagagaaacatgaaaaagaaaatgaagaattcacagggcaactaaaagtggctaaagatgttgaaaaactcattggacaagtggaaatctgggaggcagaagccaaatctgttttggatcaagatgatgtggacacctcaatggaagaatctttgaagcatcttattgccaaaggctctatgtttgatgagcttatggcaagaagtgaagatatgttacaaatggatatacaaaatatttcaagccaggagtcctttcaacatgttctcacaactgggcttcaggcaaagattcaagaagctaaagagaaagtccagatcaatgtggtaaaactcattgcagcgttgaagaacttaactgacgtttcaccagatttggacatcaggctgaagatggaagaatcccagaaggaacttgaatcatatatgatgagggctcagcagttactggggcaaagagagagccccggtgaactcatttcaaaacacaaggaagcactaataatttctaatacaaaaagtctggccaagtatttgaaagctgttgaagaactaaaaaataatgtaactgaggacataaagatgtctttagaagaaaagagtagagatgtctgtgccaaatgggagtctcttcatcatgaactgtctttatatgttcaacaactaaaaatagatattgaaaaaggaaagcttagtgacaatattttaaaacttgaaaagcaaataaataaagaaaagaaacttatccgtagaggaaggaccaagggtctcatcaaagaacatgaggcctgcttttctgaggaaggctgcctgtaccagcttaatcaccacatggaagtcctgagggagctgtgtgaagagctgccttcacagaagagtcaacaagaagtgaagagactactcaaagattatgaacaaaagatagaaagacttctgaaatgtgcttccgagattcatatgacactgcagcccacagcgggaggcacgtcgaaaaacgaggggaccatcaccacatctgagaatagaggaggggatccccacagtgaggcaccatttgcaaaatcagataatcagccatcaactgaaaaggcaatggaacccactatgaagtttagcctggcatcagtgttaaggcctctgcaagaagaaagcattatggaaaaggattacagtgcatctataaatagtttactagagaggtatgatacatacagagatattcttgaacaccacctgcaaaacaacaaattcaggattacttctgatttctctagtgaagaggacaggagtagttcttgtctgcaggctaaactgacagatctacaggtcataaaaaatgaaactgatgctcgctggaaagagtttgaaattatttcattgaagttagaaaatcatgtgaatgacataaaaaagccttttgtaattaaggaaagagacacactaaaggaaagagaaagagagcttcagatgactcttaataccagaatggaatctttagagacagcactgcggcttgtgttacctgtagagaaggcatcacttcttctctgtggctcggacctgcctctccataaaatggccatccagggatttcatctcattgatgctgatcgcatctatcaacacctaaggaatatccaagattccatagcaaaacagattgaaatatgtaaccgcttagaagagccaggcaactttgtattaaaggagttacacccatttgatctacacgcaatgcagaatattatactgaaatacaaaacacaatttgaaggaatgaaccacagggtgcagaggagtgaagatactctcaaagctctggaagactttttggcgtctctcagaacagctaaactctctgctgagcccgttacagacctttcagcctcagatacacaggtggcacaagaaaatacgttgacagtaaaaaataaagagggagaaattcatctgatgaaagacaaggccaaacatttggataaatgtttgaagatgctcgatatgagctttaaagatgctgaacggggtgatgacacctcctgtgaaaacctgcttgatgctttttcaataaagttatctgagacacatggctatggggtacaggaggaattcactgaggaaaacaaattactagaggcttgtattttcaaaaataatgaactccttaaaaatattcaagatgtgcagagtcaaatcagtaaaattggtcttaaggatcctactgttccagctgtgaaacatcggaaaaaatcattaatcagactggataaggttctagatgaatatgaagaagagaagagacatttacaagaaatggctaattctcttccacacttcaaagatggcagagaaaaaaccgtgaatcaacagtgccaaaatacagtagtcttgtgggagaataccaaagccttggtcaccgaatgtcttgaacaatgtgggagagttttggagctcttaaaacaatatcagaattttaaaagcatcttgacaactttgattcaaaaagaagagagtgtcatctccctgcaggcttcgtacatgggaaaggagaacctgaagaaaaggatagcagagattgaaattgtcaaagaagaatttaatgagcatttagaagttgtagacaagataaaccaggtctgcaaaaatctacaattttatctaaataaaatgaaaacttttgaagagcccccttttgaaaaagaggctaatattattgtggatagatggcttgatataaatgagaagacagaagattactatgaaaatcttggtcgagctctagctttgtgggacaaactttttaacttaaaaaatgtcattgatgagtggacagaaaaggcccttcaaaaaatggaattacatcaattgactgaagaggacagagaaaggctgaaggaagaattacaagtccatgaacaaaaaacttcagaattttctagaagagtggctgaaatacagtttttgctccaaagcagtgaaatacctcttgaattgcaggtcatggagtcctctattttgaacaagatggaacatgtacagaagtgcttaacaggagaatccaactgccatgcactcagtggcagcactgctgagctaagggaggatctcgaccaagccaagacccagatcgggatgactgaatccctcttaaaagccctgtctccttctgacagcttggagatcttcactaaactagaggagatacaacagcagattctacagcaaaaacacagtatgatattacttgagaatcaaataggttgtctgactcctgaactctctgaattgaaaaagcaatatgaaagtgtcagtgatttatttaataccaaaaaaagtgttttgcaagatcacttttctaagttattgaatgatcaatgcaagaactttaatgactggttcagcaacattaaagtgaaccttaaggagtgttttgaatcatcagaaacaaaaaagagtgtggaacaaaagctacaaaaactttctgatttcttgactcttgaaggaagaaacagtaaaataaagcaggtggacagcgtactgaagcatgtgaagaagcatctgcccaaagcacatgtgaaggagcttatcagttggctcgtgggtcaggaattcgaattagaaaaaatggagtccatatgccaggctcgagcaaaggagcttgaagactccttgcagcagctactgagactccaggatgaccatagaaacctgaggaagtggttgactaatcaagaagagaaatggaaaggaatggaagaaccaggggagaaaactgagctgttctgccaagctttagctagaaagagggaacagtttgaatctgtggcccaattgaacaactctttgaaggaatatgggtttactgaagaagaagaaataataatggaagcaacatgtttgatggatagataccagacattactgagacaactaagtgaaatcgaggaagaggataagttactacccacagaggaccagagctttaatgatcttgcacatgatgtaattcattggataaaagagattaaagagtcccttatggttttgaattcatccgaaggcaaaatgccacttgaggaaagaatccaaaaaatcaaggaaatcattttgctgaagcctgaaggggatgccagaatagagaccatcatgaagcaggctgagagcagcgaggccccgctggttcagaagaccctcactgacatcagcaaccagtgggacaacacactccatttagctagcacctacctaagccatcaagaaaagcttctactagaaggagagaaatatttacaaagtaaggaggatctgagattaatgctcatagaactaaagaagaaacaggaagcaggctttgctctacaacatggtctgcaggagaagaaagctcagttaaagatttataagaaattcctcaagaaagcccaagatttgacatccttgctaaaggagttaaaatctcagggaaactacctcttggagtgcactaaaaatcccagcttcagtgaagagccttggctggaaataaagcatctacacgaaagtcttcttcaacaactgcaggattctgtgcaaaacttggacggtcacgttcgagaacatgattcataccaggtttgcgtcacagacctgaatactacattggacaatttctccaaggaatttgtcagtttttctgataagcctgtggatcaaatagcggttgaggaaaaattgcagaaactgcaggaactagagaatagactcagtttacaagatggcacattaaagaagattttagctttagcaaaatccgtcaagcaaaatacatcttcagtggggcagaagattattaaagatgatataaaatcacttcagtgtaaacaaaaagatttggaaaacaggcttgcatctgctaagcaggagatggaatgttgtctcaacagcattctcaaatcaaaacgctcaacagaaaagaaaggaaagtttactctgccaggcagagagaagcaggccacttctgatgtgcaggagtctactcaggaatcagctgcagtggaaaagttggaggaagactgggaaataaacaaggattcagctgtggaaatggctatgtcaaaacaactttctcttaatgctcaagaaagcatgaaaaacactgaagatgagcggaaagtcaatgagctgcaaaatcaacctttagaattagatactatgttaagaaatgaacaattagaagagatagagaaattatatacccagttggaagcaaagaaagcagccattaagccactggaacaaacagaatgtcttaacaaaacagaaactggggccttggttctccacaatataggatattcggcacagcatttggacaatttgcttcaggcacttattactttgaagaaaaacaaagaaagccaatattgtgtcctcagagattttcaggaataccttgctgcagttgaatcttcaatgaaagccttgttgacagacaaggaaagtcttaaagtaggaccactggacagtgtaacgtatctggacaaaattaaaaaattcatagcatccatagaaaaagagaaagattctttaggcaacttgaaaatcaaatgggagaatttatcaaaccacgtgactgacatggataagaaattgttggaaagccagattaagcaacttgaacatggttgggaacaagtggaacagcagattcaaaagaagtattctcagcaggtagtggaatatgatgaatttacaaccctcatgaataaggtacaggacactgagatttctctgcaacagcagcagcaacatctacagttaaggctgaagtctccagaagaacgggcagggaaccaaagcatgattgccttgaccactgacctccaggctaccaagcatggattttctgttttaaaggggcaagctgaacttcagatgaagaggatttggggagaaaaagaaaagaagaatttggaggatggaataaataacttgaagaaacaatgggaaacattggagccattacacttagaagcagaaaatcagattaagaagtgtgacataaggaacaagatgaaagagactatcttatgggccaagaatttgttgggtgaacttaatccctccattccccttctcccagatgacattctttcacagatcagaaagtgcaaagtgacacatgatggcattctagctaggcagcagtctgtggaatcgttggctgaagaggtcaaagataaggttcctagccttacaacctatgagggcagtgatttaaataataccctagaggacttacggaatcaataccaaatgctggttttaaaatcaactcaaagatcacagcaattagaatttaagttggaagaaagaagcaatttttttgctataataaggaagtttcaacttatggttcaagaaagtgaaacactgataattcccagggtggagacagctgccacggaagctgaactaaaacatcaccatgttactttggaggcatctcagaaggaattgcaagaaattgacagtggaatctcaacacatcttcaggagctaacaaacatctatgaggagctgaatgtgtttgaaagattatttctggaagatcagttgaaaaatcttaagattaggaccaacagaatacaaagattcattcagaatacatgtaatgaagtggaacacaagataaagttttgcagacaattccatgaaaaaacatcagcgcttcaggaggaggctgacagtatacagcgcaatgaactattacttaatcaagaagtaaataaaggtgttaaagaggagatctataatcttaaagacagactcaccgctattaagtgttgcatcttacaggtattgaaacttaaaaaagtgtttgactatattggactaaactgggatttttcacaacttgaccaattacaaacccaagtatttgaaaaagaaaaggaacttgaagaaaaaattaagcagttggacacatttgaggaagaacatggcaaatatcaggcattattaagtaaaatgagagctattgatttgcaaattaagaaaatgactgaagtagtactaaaagctcctgatagctctccggaaagcagacggctcaatgcccaaattttaagtcagagaattgagaaagccaagtgtttatgtgatgagataataaagaaattaaatgaaaataagacctttgatgactcattcaaggagaaagaaatactacaaataaagctgaatgcagaagaaaatgataagttatacaaagttctccaaaacatggtattagaactctcaccaaaagaattggatgaaaagaattgtcaggacaaactagaaacttccttacatgttttaaatcagataaaatctcaattacagcagccattacttataaatttggaaattaaacatattcaaaatgaaaaggacaattgtgaagcatttcaggagcaagtttgggcagaaatgtgtagtattaaagctgtgactgctattgagaaacaaagagaagaaaactcttctgaagcgagtgatgtggagacaaaactacgtgagtttgaagatcttcagatgcagcttaacacaagcattgatttgcgcacaaatgtcttgaatgatgcttatgaaaatctaacacgctataaagaagcagtcaccagggcagtggagagcatcacttccctcgaagccatcattataccctacagagtagatgttggtaatccagaagaatctttagagatgcctcttcgaaaacaagaggaattggaatccacagtagcacacatccaggacctcactgagaaactgggaatgatatccagccccgaagccaaactacaacttcagtatactttacaggaactagtttctaagaactcagcaatgaaggaagctttcaaagcacaggaaactgaggcagaaaggtatcttgagaattacaaatgctatagaaaaatggaagaggatatttacactaacctcagcaaaatggagacagttcttggacagtccatgtcctcgttgccactgtcttacagagaagctttagagcgcttggaacagagcaaggccttggtgtcaaatcttatatcaaccaaagaagagttaatgaaactacgacagatccttagactcttgagactcaggtgcacagaaaatgatggcatatgtttgctcaagattgtgtcggctctgtgggagaaatggctgagtttgctggaagctgctaaagagtgggagatgtggtgcgaagaactgaagcaggaatggaaatttgtcagtgaagaaattgaacgagaggcaattattttagataatcttcaggaagaactccctgaaatttccaaaacaaaagaggcagccaccacagaggaactctctgagctgctagactgtttatgccaatatggagagaacgtggagaagcaacagctgttactgactctacttcttcagcgcatcagaagtatccagaatgttcctgaaagctcaggggctgtggaaactgttccagcatttcaagaaattacttctatgaaagaacgatgcaacaagcttcttcagaaagttcagaaaaataaagaattggtgcagactgaaatccaagaaagacattccttcacaaaagagataattgctttgaagaatttctttcaacagaccacaacttcattccaaaatatggcattccaggatcacccagaaaagtcagaacaatttgaggagcttcaaagcatccttaagaaagggaaactaacttttgagaatattatggaaaaactgcgaatcaagtattccgaaatgtacaccatagtccctgcagagattgaatcccaggtggaagaatgcagaaaagctttagaagacatagatgagaagattagcaatgaagtcttaaaaagctcaccatcatatgcaatgaggagaaaaatagaagaaattaacaatgggcttcataatgttgaaaagatgttgcagcagaaaagcaaaaatattgagaaagctcaagaaattcaaaagaaaatgtgggacgagttagatctatggcattccaaactaaatgagctggattctgaagttcaggacattgttgaacaggacccaggacaggctcaagaatggatggataacttgatgattcctttccagcagtatcagcaagtatcacagagagcagagtgtagaacctcacagttgaataaggccacagttaagatggaggaatatagtgaccttctgaagagcactgaggcttggatagaaaataccagtcatttgctggccaatcctgctgactatgactctttgaggacactgagtcaccatgctagcactgtgcagatggctttggaagattcagaacagaagcacaatcttttacattcaatctttatggatctagaagacctgtcaataatttttgaaacagatgaattaacccaatccatacaagagttaagtaatcaagtaacagctttacaacaaaaaataatggaaagccttccacagattcagcgaatggctgatgatgtggttgctattgaatctgaagtaaaatcaatggaaaaaagagtttcaaaaatcaaaactatcctattatcaaaagaaatatttgatttttcacctgaagaacatctcaaacatggggaggtcatacttgaaaatatacgtcccatgaagaaaaccattgctgagatagtgtcttaccaagtggaactgaggttgccccaaacaggaatgaaacctctgcctgtgtttcagcggacaaatcagcttttacaagatataaaactattggaaaatgtgactcaagaacaaaatgagttattaaaggtagtcataaaacagaccaatgaatgggatgaagaaatagaaaatttgaaacagatcttaaataattattcagctcagttctcccttgaacatatgtcaccagaccaagctgacaagctgccacaactacagggagaaatcgaacgtatggagaaacagattctgagtttgaaccagagaaaagaagacctgttggtggacttgaaggccaccgtactaaaccttcaccagcatttgaagcaagaacaagaaggagtagaaagagataggctgccagctgtaacatcagaggaaggtggagtggcagagagggatgcttctgagcggaagttgaacagaagaggctccatgtcttacctggcagcagtcgaggaagaggtggaagaaagttccgtgaagagcgataatggagatgagaaggcagagccatcgcctcagtcttggtcttcactttggaagcatgacaaggacatggaagaagacagagcttcctcatcctctggaacaattgttcaggaagcatatgggaaaataagcacctctgataattccatggcacaaatcctcacaccagactcactaaacactgagcaaggcccagaatgttccctaaggcccaaccaaacagaagagggcaccacacctcctattgaggctgacactctggactcttctgacgcgcaaggaggtttggagcccagggtggagaaaactaggccggagcccacagaagtcctgcatgcctgcaagacccaggtggccgagctggagctgtggctgcaacaagccaacgtggcagttgagccggaaacattaaacgcagacatgcagcaggtgctggaacagcagctggtagggtgccaggctatgctaacagagattgagcacaaggttgcctttctgttagagacttgcaaagatcagggcctgggagataatggagccactcaacatgaggctgaagcgctttccctgaaactgaaaacagtgaagtgcaatttagaaaaagtccagatgatgcttcaggagaagcacagtgaagatcagcatcctaccattctaaagaaatcctcagagccagagcatcaagaagctctccaaccagttaacctttctgaattggaatccattgtaactgaaaggccacaattcagcagacaaaaagatttccagcagcaacaggttctggagttaaaaccaatggaacagaaagatttcatcaaattcatagaatttaatgctaagaaaatgtggccccagtattgccaacatgataacgatacaactcaggaatcatctgcaagcaaccaggcatccagccctgaaaatgacgttccagactcgatcttgtcaccccagggccaaaatggagataagtggcaatatctgcatcatgaactctcatcaaaaataaagctcccactccctcagcttgtggagcctcaggtttccacaaatatgggtattctacccagcgtgactatgtataactttagatacccaacaactgaagaactgaaaacctataccacccaacttgaagacctgcgccaagaagcaagtaaccttcagacacaggaaaatatgacagaagaagcatatatcaatttggataaaaaattgtttgaactattcctgaccctcagtcagtgcctcagcagtgtggaggagatgctggagatgcccagactttacagggaggatggttctggccagcaggtgcactacgagacgctggctcttgagttgaagaaactttatttagcgctaagtgacaagaagggtgatcttttgaaagccatgacttggcctggcgagaacaccaacttgctccttgaatgttttgacaaccttcaagtctgcctggagcacactcaggctgcagctgtctgtagaagcaagtccctgaaagctggcctcgattacaaccgcagttaccagaatgaaataaagagattatatcatcagctcattaagagtaagacatctttacaacagtctttgaatgaaatcagtgggcagagtgttgctgaacagcttcagaaagcagatgcatatacagtggagctggagaacgccgagagccgagtggccaaactaagagatgaaggggagaggcttcatttaccttatgctttactccaggaggtttacaaattagaggatgtacttgacagtatgtggggaatgctaagagccaggtacacagaactcagcagccctttcgtcactgagagccagcaagatgctttgttgcaaggcatggtggaactggtgaagattgggaaggaaaagcttgctcatggccacttaaaacaaaccaaaagtaaagtggcgttacaggctcaaatagaaaatcacaaggtttttttccagaagcttgttgctgacatgttgttgatccaagcatactctgccaaaatacttccttctttattgcaaaacagagagacattttgggcagaacaagtaacagaagttaaaatactagaagaaaagtcacgccaatgtggtatgaagctgcagagtttgttgcagaaatgggaagaatttgatgaaaactatgcatctcttgaaaaggacctggaaattcttatatctacattgccctctgtgagtttggtggaagaaacagaggaaagattagtggaaaggatttcattttaccagcaaataaaaagaaacattggtggaaaacacgcccggctttaccaaactctgaacgaaggcaaacagttggtggcgtctgtgagctgtcctgaattagagggccagatcgcaaaactggaagagcagtggttgtccctgaacaagaaaattgaccatgagctccacaggctgcaagctcttctcaagcatctgctcagttataacagagattcggatcagttaaccaagtggttggaatcttcccagcatactctgaattactggaaagaacagtccctcaatgtgtctcaggacttggatacaatcagaagcaacatcaacaatttttttgagttttcaaaagaagttgatgaaaaatcctccttgaagactgccgttatcagtatcgggaaccagcttcttcacctgaaagaaactgatacagctacactgagagcttctttagcacagtttgaacaaaaatggacaatgctcataactcaacttccagatattcaagaaaaacttcaccagcttcaaatggagaaattgccgtctcgtaaagcaatcacagaaatgattagctggatgaacaatgtggagcatcaaacttcagatgaagactccgtgcattcaccaagttctgcatctcaagttaaacatcttcttcagaagcacaaggagtttagaatggaaatggactataaacagtggatagttgacttcgttaaccagtcattacttcagctaagcacctgtgatgtagaaagcaagcgctatgaaagaacggagtttgcagagcacctgggggagatgaaccgccagtggcaccgtgtacatggaatgctgaatagaaagatacaacatttagaacaacttctagaaagtatcactgagagtgaaaataaaatacagatcttgaacaactggctggaagcacaagaagagagactgaaaactttacaaaaacctgaaagtgtgatctcagtgcagaagctgctcctggactgtcaggatatagaaaatcaacttgcaattaaatccaaagcactagatgagttgaaacaaagttatctgactttggagagtggggcagtgccattgttagaagatacagcatcccgaattgatgagttatttcaaaagagaagcagtgttctcactcaggtcaatcagctcaaaacctccatgcagtcagttttacaggagtggaagatttatgatcaactctatgatgaagtgaatatgatgacaatccgattctggtactgcatggaacacagcaagcctgtggtgttatcattggagaccttgagatgccaggtggagaaccttcagtctctgcaagatgaagctgagagcagtgaagggagttgggagaaactccaggaggttatcggcaaactcaaaggtctctgcccctctgttgctgaaataatcgaagagaaatgccaaaatactcataaaaggtggactcaggtgaaccaagccattgcagaccagttgcagaaggcccagagtctgctccagctctggaaggcctatagcaatgctcatggtgaagctgccgcaaggctgaagcagcaggaagcaaagtttcaacagctcgcaaacatcagcatgtctggaaacaacctggcagagatcctgcccccagccctgcaggacataaaggagctgcagcatgatgtgcagaaaacaaaagaagcctttctccaaaattccagtgtcctggatcgactcccacaacccgcagagtccagcacccacatgctcctcccgggccccctgcactctctccagagggctgcttatttggaaaagatgctgcttgtgaaagcaaatgaatttgagtttgttctctcacagtttaaggattttggagtccggctggaatctttaaaaggtcttattatgcatgaagaagagaatttggatagacttcaccaacaggaaaaagaaaatcctgactcattcctgaatcatgtgctggcactgacagcccaatcacctgatattgaacatttgaatgaagtgagcctcaagctcccacttagtgacgtagctgtgaagacgttacaaaatatgaaccggcaatggattcgggccacggccacggcactggagcgctgcagtgagcttcagggaattggattgaatgaaaagtttctttattgctgtgaaaagtggatccaacttttggagaagatagaagaagcactcaaagtggatgtggctaacagccttcctgagctcctggagcagcagaaaacctataagatgttagaagctgaagtttctataaaccagacaattgctgattcctatgtcacccagtccttacaactcctggacacaacagaaatagagaacagaccagaatttattacagaattctcaaagctgacggatcggtggcagaatgctgtccagggtgttcggcagaggaagggtgacgttgatgggctggtgaggcagtggcaagatttcactacttctgtggagaacttgtttcgcttcctcactgacaccagccacctgctatctgcagtgaagggccaggagcgcttcagcctctaccaaaccagaagtctgatccatgagctgaagaataaagaaattcattttcaaaggaggcgaactacctgtgccctaaccttggaagctggagaaaagttactgctcacaactgacctgaaaactaaagagtctgtgggtaggagaatcagtcaacttcaggacagctggaaagacatggagccccagctggcagagatgattaagcagttccagagcactgtagagacctgggaccagtgtgaaaagaaaatcaaggagttgaaaagcaggctgcaagttttaaaggcacaaagtgaagatcctcttccagagcttcacgaggacctccataacgaaaaagagctgattaaggaactagaacagtctttggctagctggactcagaacttgaaagaacttcaaactatgaaggcggacttaacccggcacgttctcgtggaagatgtgatggttttgaaggagcaaatagagcatttgcacagacaatgggaggacctctgcttaagggtggccatacgtaaacaggagattgaagacagactcaatacatgggttgtattcaatgaaaaaaataaagagttgtgtgcctggctggtgcagatggaaaacaaagttctacagacagcggacattagtattgaagaaatgattgaaaagttacagaaggactgcatggaagaaataaacttgtttagtgaaaacaagttacagttaaagcagatgggtgaccagttgatcaaggccagcaacaaatcaagagcagctgagatcgatgacaagctcaacaaaattaacgatcgttggcaacatctttttgatgtcatcggatcaagggtgaagaagctgaaggagacctttgcttttattcagcagttggacaaaaacatgagcaaccttcgcacctggttggctcgaattgagtctgagctttccaagcctgttgtttatgatgtctgcgatgatcaagagatccagaagaggctcgctgagcagcaggatctacagcgagatattgaacaacacagcgcaggggtggagtccgtgtttaacatctgtgacgtcctactgcacgactccgatgcctgtgcaaatgagaccgagtgtgactcgatccagcagaccaccaggagcctggacagacgctggaggaacatttgtgccatgtccatggagcggcgcatgaaaatcgaggagacgtggcgcctgtggcagaagtttttagacgactattctcgctttgaggactggctcaagtcagctgagaggacggcagcctgcccaaattcctcagaggtgttgtacacgagtgccaaagaggaactgaagaggtttgaggcctttcagcggcagattcatgagcggctcactcagctggagctcatcaacaagcagtaccggcggctggcccgggagaaccgcacagacacggccagcaggctgaagcagatggtccacgagggcaaccagcgctgggacaaccttcagaggcgggtcacagccgtcctgcggagactcaggcatttcaccaaccagagggaagaatttgagggcaccagggagagcattctggtgtggctcacagagatggacctgcagctgaccaacgtggagcacttctcagagagtgacgccgatgacaagatgcgccaactgaatggcttccaacaggaaattacattaaataccaacaagattgatcagctcattgtgtttggggagcagctgattcagaagagcgagcccctggatgctgtgctgattgaggatgagctggaggaactccaccgctactgccaggaggtgtttggaagggtctcccggttccaccggcggctcacctcctgcactccgggcttggaagatgaaaaggaggcctctgagaatgaaacagacatggaagaccccagagaaatccagactgattcttggcgtaaacggggagagagcgaggaaccgtcatctcctcagtccctgtgtcatctagtggccccagggcacgagcggtctggctgcgagacccctgtcagcgtggactccatccccctggagtgggaccacacaggcgacgtggggggctcctcctctcacgaagaggacgaggagggcccatactacagcgcactgtcaggtaaatccatttcggatggccactcgtggcatgttcccgacagcccttcctgtcccgagcatcactacaagcaaatggaaggtgacaggaatgttccacctgttccccctgcgtccagcaccccttataaaccaccctatggaaagctactattacctccaggcacggatggtggcaaagaaggcccgcgagtcctgaatggcaacccacagcaggaagacgggggactggccggtatcacagagcagcagtcaggtgccttcgacagatgggagatgattcaagcacaggagcttcacaataagctcaaaataaaacaaaatttgcaacagctgaactctgatatcagcgccatcactacttggctgaaaaaaactgaagcagagctggaaatgttaaagatggcaaagcctccctctgatatccaggaaatagaactgagagtgaagagactgcaggagatactgaaagcctttgacacttacaaggcattagtggtctctgtcaacgtgagcagcaaggaatttctgcaaaccgagagccccgaatccacagagctccaaagtagactccgccagctgagcctgctctgggaagcagcacagggcgcagtggacagctggagagggggcttacgacagtcgctcatgcagtgccaggacttccaccagttgagtcaaaatctgctgctgtggttagcgagtgccaagaaccggaggcagaaggctcatgtcaccgatccaaaggcagacccccgggctctcctagagtgtcggagggaactaatgcaactggaaaaggagctggtagaacgtcaacctcaagtggacatgttacaggagatttcaaacagccttctcattaagggacatggagaagactgtattgaagctgaagaaaaggtgcatgttattgagaagaaactcaaacagttacgggagcaagtgtcccaagatttaatggccttgcagggaacccagaacccagcctcacccctgcccagcttcgacgaggtagactcgggggaccagcctcctgcaacatccgtgccagctccccgagcaaagcagttcagagcagtgagaactacagaaggcgaggaggagacagagagcagggtccccggcagcacacggccacagcgctccttcctctcaagggtggtccgggcagccctacccctgcagctgctcctcctgctgctgctgctcctggcctgcctgctgccctcctccgaagaagactacagctgcactcaggccaacaactttgcccggtccttttaccccatgctgaggtacaccaatgggccaccccccacatag

SEQ ID NO: 146 - DNA, 780 bp, Homo sapiens
atggcgcccaacatctacttggttcgccagcggatcagtcgactcggccagaggatgtccggcttccagatcaacctcaacccgctcaaggagccactcggcttcatcaaggtcctcgagtggattgcttctatctttgcttttgccacctgtggaggttttaagggccaaacagaaattcaagtgaattgtcctcctgcagttactgagaataaaactgttacagctacttttggttatccattcaggttgaatgaggcatcatttcagccacctccaggtgtaaacatatgtgatgtaaattggaaagattacgtcctcataggcgattactcttcttctgcacaattctatgttacctttgcagtctttgtgttcctgtactgcattgctgcccttctgctttatgttggctacacgagtctgtatctggatagtcgtaaacttcctatgatagactttgttgttacacttgttgccacttttttgtggttggtgagcacttcagcctgggctaaagctctgacagatattaaaatagctactggtcacaatattattgatgaacttccgccttgtaagaagaaagcagtactgtgttactttggctctgtgaccagtatgggatccctaaatgtatctgtgatatttggctttctaaatatgatactctggggaggaaatgcttggtttgtgtacaaggagaccagcctacacagtccatcaaatacatctgcccctcatagccaaggaggtattccacctcctaccggaatataa

SEQ ID NO: 147 - DNA, 1296 bp, Homo sapiens
atggctgagatcaccaatatccgacctagctttgatgtgtcaccggtggtggccggcctcatcggggcctctgtgctggtggtgtgtgtctcggtgaccgtctttgtctggtcatgctgccaccagcaggcagagaagaagcagaagaacccaccatacaagtttattcacatgctcaaaggcatcagcatatacccagagaccctcagcaacaagaagaaaatcatcaaagtgcggagagacaaagatggtcctgggagggaaggtggacgtaggaacctgttggtggacgcagcagaggctggcctgctaagccgagacaaagatcccagggggcctagctctggatcttgtatagaccaattacccatcaaaatggactatggggaagaactaaggagccctattacaagcctgacccctggggagagcaaaaccacctctccatcatctccagaggaggatgtcatgctaggatccctcaccttctcagtggactataacttcccgaaaaaagccctggtggtgacaatccaggaggcccatgggctgccagtgatggatgaccagacccagggatctgacccctacatcaaaatgaccatccttcctgacaaacggcatcgggtgaagaccagagtgctgcggaagaccctggaccctgtgtttgacgagaccttcaccttctatggcatcccctacagccagctgcaggacctggtgctgcacttccttgtcctcagctttgaccgcttctctcgggatgatgtcattggcgaggtcatggtgccactggcaggggtggaccccagcacaggcaaggtacaactgaccagggacatcatcaaaaggaatatccagaagtgcatcagcagaggggagctccaggtgtctctgtcatatcagcctgtggcacagagaatgacagtggtggtcctcaaagccagacacttgccgaagatggatatcaccggtctctcaggtaatccttatgtcaaggtgaacgtctactacggcagaaagcgcattgccaagaagaaaacccatgtgaagaagtgcactttgaaccccatcttcaatgaatctttcatctacgacatccccactgacctcctgcctgatatcagcatcgagttcctcgttatcgacttcgatcgcaccaccaagaatgaggtggtggggaggctgatcctgggggcacacagtgtcacagccagtggtgctgaacactggagagaggtctgcgagagcccccgcaagcctgtggccaagtggcacagtctgagcgagtactaa

SEQ ID NO: 148 - DNA, 1278 bp, Homo sapiens
atggataaaaacattggcgagcaactcaataaagcgtatgaagccttccggcaggcatgcatggatagagattctgcagtaaaagaattacagcaaaagactgagaactatgagcagagaatacgtgaacaacaggaacagctgtcacttcaacagactattattgacaagctaaaatctcagttacttcttgtgaattccactcaagataacaattatggctgtgttcctctgcttgaagacagtgaaacaagaaagaataatttgactcttgatcagccacaagataaagtgatttcaggaatagcaagagaaaaactaccaaaggtaagaagacaagaggtttcttctcctagaaaagaaacttcagcaaggagtcttggcagtcctttgctccatgaaaggggtaatatagagaagactttctgggatctgaaagaagaatttcataaaatatgcatgctagcaaaagcacagaaagaccacttaagcaaacttaatataccagacactgcaactgaaacacagtgctctgtgcctatacagtgtacggataaaacagataaacaagaagcgctgtttaagcctcaggctaaagatgatataaatagaggtgcaccatccatcacatctgtcacaccaagaggactgtgcagagatgaggaagacacctcttttgaatcactttctaaattcaatgtcaagtttccacctatggacaatgactcaactttcttacatagcactccagagagacccggcatccttagtcctgccacgtctgaggcagtgtgccaagagaaatttaatatggagttcagagacaacccagggaactttgttaaaacagaagaaactttatttgaaattcagggaattgaccccatagcttcagctatacaaaaccttaaaacaactgacaaaacaaagccctcaaatctcgtaaacacttgtatcaggacaactctggatagagctgcgtgtttgccacctggagaccataatgcattatatgtaaatagcttcccacttctggacccatctgatgcaccttttccctcactcgattccccgggaaaagcaatccgaggaccacagcagcccatttggaagccctttcctaatcaagacagtgactcggtggtactaagtggcacagactcagaactgcatatacctcgagtatgtgaattctgtcaagcagttttcccaccatccattacatccaggggggatttccttcggcatcttaattcacacttcaatggagagacttaa

SEQ ID NO: 149 - DNA, 2427 bp, Homo sapiens
atggctgagcttctcgccagcgcaggatcagcctgttcctgggactttccgagagccccgccctcgttccctcccccagccgccagtaggggaggactcggcggtacccggagcttcaggccccaccggggcgcggagagtcccaggcccggccgggaccgggacggcgtccgagtgccaatggctagctctaggtgtcccgctccccgcgggtgccgctgcctccccggagcttctctcgcatggctggggacagtactgctacttctcgccgactgggtgctgctccggaccgcgctgccccgcatattctccctgctggtgcccaccgcgctgccactgctccgggtctgggcggtgggcctgagccgctgggccgtgctctggctgggggcctgcggggtcctcagggcaacggttggctccaagagcgaaaacgcaggtgcccagggctggctggctgctttgaagccattagctgcggcactgggcttggccctgccgggacttgccttgttccgagagctgatctcatggggagcccccgggtccgcggatagcaccaggctactgcactggggaagtcaccctaccgccttcgttgtcagttatgcagcggcactgcccgcagcagccctgtggcacaaactcgggagcctctgggtgcccggcggtcagggcggctctggaaaccctgtgcgtcggcttctaggctgcctgggctcggagacgcgccgcctctcgctgttcctggtcctggtggtcctctcctctcttggggagatggccattccattctttacgggccgcctcactgactggattctacaagatggctcagccgataccttcactcgaaacttaactctcatgtccattctcaccatagccagtgcagtgctggagttcgtgggtgacgggatctataacaacaccatgggccacgtgcacagccacttgcagggagaggtgtttggggctgtcctgcgccaggagacggagtttttccaacagaaccagacaggtaacatcatgtctcgggtaacagaggacacgtccaccctgagtgattctctgagtgagaatctgagcttatttctgtggtacctggtgcgaggcctatgtctcttggggatcatgctctggggatcagtgtccctcaccatggtcaccctgatcaccctgcctctgcttttccttctgcccaagaaggtgggaaaatggtaccagttgctggaagtgcaggtgcgggaatctctggcaaagtccagccaggtggccattgaggctctgtcggccatgcctacagttcgaagctttgccaacgaggagggcgaagcccagaagtttagggaaaagctgcaagaaataaagacactcaaccagaaggaggctgtggcctatgcagtcaactcctggaccactagtatttcaggtatgctgctgaaagtgggaatcctctacattggtgggcagctggtgaccagtggggctgtaagcagtgggaaccttgtcacatttgttctctaccagatgcagttcacccaggctgtggaggtactgctctccatctaccccagagtacagaaggctgtgggctcctcagagaaaatatttgagtacctggaccgcacccctcgctgcccacccagtggtctgttgactcccttacacttggagggccttgtccagttccaagatgtctcctttgcctacccaaaccgcccagatgtcttagtgctacaggggctgacattcaccctacgccctggcgaggtgacggcgctggtgggacccaatgggtctgggaagagcacagtggctgccctgctgcagaatctgtaccagcccaccgggggacagctgctgttggatgggaagccccttccccaatatgagcaccgctacctgcacaggcaggtggctgcagtgggacaagagccacaggtatttggaagaagtcttcaagaaaatattgcctatggcctgacccagaagccaactatggaggaaatcacagctgctgcagtaaagtctggggcccatagtttcatctctggactccctcagggctatgacacagaggtagacgaggctgggagccagctgtcagggggtcagcgacaggcagtggcgttggcccgagcattgatccggaaaccgtgtgtacttatcctggatgatgccaccagtgccctggatgcaaacagccagttacaggtggagcagctcctgtacgaaagccctgagcggtactcccgctcagtgcttctcatcacccagcacctcagcctggtggagcaggctgaccacatcctctttctggaaggaggcgctatccgggaggggggaacccaccagcagctcatggagaaaaaggggtgctactgggccatggtgcaggctcctgcagatgctccagaatga

SEQ ID NO: 150 - DNA, 3897 bp, Homo sapiens
atggagccgcccagctgcattcaggatgagccgttcccgcaccccctggagcccgagccgggcgtctcagctcagcccggccccgggaagccaagcgataagcggttccggctgtggtacgttggggggtcgtgcctggaccacaggaccacgctgcctatgctgccctggctcatggccgagatccgcaggcgcagccagaagcccgaggcgggcggctgcggggcgccggcggcccgagaggtgatcctggtgctcagcgcgcccttcctgcgttgcgtccccgcgccgggcgctggggcctcggggggcactagtccgtcggccacgcagcccaacccggcggtattcatcttcgagcacaaggcgcagcatatctcgcgcttcatccacaacagccacgacctcacctactttgcctacctgatcaaggcgcagcccgacgaccccgagtcgcagatggcctgccacgttttccgcgccacagaccccagccaggttcctgatgttattagcagcataaggcaattatctaaagcggccatgaaagaggatgccaaacccagcaaagataatgaggacgccttttacaactctcagaagttcgaagtcctgtactgtggaaaggtgaccgtgacccacaagaaggccccctcaagcctcatcgatgactgcatggagaagttcagcctgcacgaacagcagcgcctgaagatccaaggggagcagcgcggtccggacccaggagaggacctggctgacttggaggtggtggtgcccgggtcccccggagactgcctgccggaggaggctgacggcaccgacacccaccttggcttacctgccggggccagccagcctgccctgaccagctctcgggtctgcttccctgagcggattttggaagattctggctttgatgagcagcaggagtttcggtctcggtgcagcagtgtcaccggcgtgcaacggagagttcacgagggcagccagaaatcccagccgcgacggagacacgcgagcgcacccagtcacgtccagccctcggactcggagaagaacaggaccatgctcttccaggttgggcgatttgagattaaccttatcagtccagacactaaatcagttgtgctagaaaagaattttaaagatatctcctcttgttctcagggtataaagcatgtggatcactttggctttatctgccgggagtctccagagcctggacttagccagtatatttgttatgtattccagtgtgccagcgaatctctggttgatgaggtaatgctgactctgaaacaggccttcagtacggcggctgccctgcagagtgccaagacgcagattaaactgtgtgaggcctgcccgatgcactctttgcataagctctgtgaaaggattgaaggtctctacccaccaagagccaagctggtgatacagaggcatctctcatcactgacagataatgagcaagctgacatctttgaaagagttcagaaaatgaagccagtcagtgaccaggaagaaaatgaacttgtgattttacacctgaggcagctgtgtgaagccaagcagaagacacacgtgcacatcggggaaggcccttctactatttcaaatagtacaatcccagaaaatgcaacaagcagtggaaggttcaaacttgacattctgaaaaataaagctaagagatccttaactagctccctggaaaatatcttctcaaggggagctaacagaatgagaggtcggcttggaagtgtggacagttttgaacggtccaacagtcttgcttcagagaaggactactcaccaggggattctccaccagggacaccgccagcgtccccaccgtcctcagcttggcaaacgtttcccgaagaggattccgactccccgcagtttcgaagacgggcacacacgttcagccacccaccttcaagcacaaagagaaagctgaatttgcaggatgggagggctcagggtgtgcgttcccctctgctgaggcagagctccagtgaacagtgcagcaatctttcgtcagttcgacgcatgtacaaggagagtaattcttcctccagtcttccaagtcttcacacttccttctctgccccttccttcactgccccctctttcctgaaaagcttttaccagaattcaggtagactgtccccacagtatgaaaatgaaatcagacaagacactgcttcagaatcaagtgatggagaagggagaaaaaggacctcatctacctgcagcaatgagtccctaagtgtgggaggaacctctgtcactcctcgccggatctcctggcggcagcgcattttcctcagggttgcttctcccatgaacaaatctccctcagcaatgcaacagcaagatggattggacaggaacgagctgctgccactgtcccccctctctccaaccatggaggaggaaccgctggttgtattcctgtctggggaggatgacccagaaaagattgaagaaagaaagaaatcaaaagaactgaggagcttgtggagaaaagctatacaccaacaaatcttgttacttcgaatggaaaaagaaaaccagaaacttgaagcaagcagagatgaactccagtccagaaaagttaaattagactatgaagaagttggtgcatgtcagaaagaggtcttaataacttgggataagaagttgttaaactgcagagctaaaatcagatgtgatatggaagatattcatactcttcttaaagaaggagttcccaaaagtcgacgaggagaaatttggcagtttctggctttacagtaccgactcagacacagattgcctaataaacaacagcctcctgacatatcctataaggaacttttgaagcagctcactgctcagcagcatgcgattctcgtggatttaggaaggacgtttcctactcacccttacttttcagtacagcttgggccaggacagctgtcactgtttaacctcctgaaagcctattctttgctggacaaagaagtgggatactgtcaggggatcagctttgtggctggagtcctgcttctgcacatgagtgaagagcaagcctttgaaatgctgaaattcctcatgtatgacctcggcttccgcaagcagtacagacctgacatgatgtcgctgcagattcaaatgtaccagctgtccaggctccttcatgactatcacagagatctctacaatcaccttgaagaaaatgaaatcagccccagtctttatgctgccccctggttcctcacattgtttgcctctcagttttcattaggatttgtagccagagtttttgatattatttttcttcagggaactgaagttatattcaaggttgcactcagcctactgagcagccaagagacacttataatggaatgtgagagctttgaaaatattgttgagtttcttaaaaacacgctacctgatatgaatacctctgaaatggaaaaaattattacccaggtttttgagatggatatttctaagcagttgcatgcctatgaggtggaatatcatgtgctacaggatgagcttcaggaatcttcatattcctgtgaggatagtgaaactttggagaagctggagagggccaatagccaactgaaaagacaaaacatggacctcctagaaaaattacaggtagctcatactaaaatccaggccttggaatcaaacctggaaaatcttttgacgagagagaccaaaatgaagtctttaatccggaccctggaacaagaaaaaatggcttatcaaaagacagtggagcaactccggaagctgctgcccgcggatgctctagtcaattgtgacctgttgctgagagacctaaactgcaaccctaacaacaaagccaagataggaaataagccataa

SEQ ID NO: 151 - DNA, 2190 bp, Homo sapiens
atgcagagcacttctaatcatctgtggcttttatctgatattttaggccaaggagctactgcaaatgtctttcgtggaagacataagaaaactggtgatttatttgctatcaaagtatttaataacataagcttccttcgtccagtggatgttcaaatgagagaatttgaagtgttgaaaaaactcaatcacaaaaatattgtcaaattatttgctattgaagaggagacaacaacaagacataaagtacttattatggaattttgtccatgtgggagtttatacactgttttagaagaaccttctaatgcctatggactaccagaatctgaattcttaattgttttgcgagatgtggtgggtggaatgaatcatctacgagagaatggtatagtgcaccgtgatatcaagccaggaaatatcatgcgtgttataggggaagatggacagtctgtgtacaaactcacagattttggtgcagctagagaattagaagatgatgagcagtttgtttctctgtatggcacagaagaatatttgcaccctgatatgtatgagagagcagtgctaagaaaagatcatcagaagaaatatggagcaacagttgatctttggagcattggggtaacattttaccatgcagctactggatcactgccatttagaccctttgaagggcctcgtaggaataaagaagtgatgtataaaataattacaggaaagccttctggtgcaatatctggagtacagaaagcagaaaatggaccaattgactggagtggagacatgcctgtttcttgcagtctttctcggggtcttcaggttctacttacccctgttcttgcaaacatccttgaagcagatcaggaaaagtgttggggttttgaccagttttttgcagaaactagtgatatacttcaccgaatggtaattcatgttttttcgctacaacaaatgacagctcataagatttatattcatagctataatactgctactatatttcatgaactggtatataaacaaaccaaaattatttcttcaaatcaagaacttatctacgaagggcgacgcttagtcttagaacctggaaggctggcacaacatttccctaaaactactgaggaaaaccctatatttgtagtaagccgggaacctctgaataccataggattaatatatgaaaaaatttccctccctaaagtacatccacgttatgatttagacggggatgctagcatggctaaggcaataacaggggttgtgtgttatgcctgcagaattgccagtaccttactgctttatcaggaattaatgcgaaaggggatacgatggctgattgaattaattaaagatgattacaatgaaactgttcacaaaaagacagaagttgtgatcacattggatttctgtatcagaaacattgaaaaaactgtgaaagtatatgaaaagttgatgaagatcaacctggaagcggcagagttaggtgaaatttcagacatacacaccaaattgttgagactttccagttctcagggaacaatagaaaccagtcttcaggatatcgacagcagattatctccaggtggatcactggcagacgcatgggcacatcaagaaggcactcatccgaaagacagaaatgtagaaaaactacaagtcctgttaaattgcatgacagagatttactatcagttcaaaaaagacaaagcagaacgtagattagcttataatgaagaacaaatccacaaatttgataagcaaaaactgtattaccatgccacaaaagctatgacgcactttacagatgaatgtgttaaaaagtatgaggcatttttgaataagtcagaagaatggataagaaagatgcttcatcttaggaaacagttattatcgctgactaatcagtgttttgatattgaagaagaagtatcaaaatatcaagaatatactaatgagttacaagaaactctgcctcagaaaatgtttacagcttccagtggaatcaaacataccatgaccccaatttatccaagttctaacacattagtagaaatgactcttggtatgaagaaattaaaggaagagatggaaggggtggttaaagaacttgctgaaaataaccacattttagaaaggtttggctctttaaccatggatggtggccttcgcaacgttgactgtctttag

SEQ ID NO: 152 - DNA, 2004 bp, Homo sapiens
atgcatcaccaacagcgaatggctgccttagggacggacaaagagctgagtgatttactggatttcagtgcgatgttttcacctcctgtgagcagtgggaaaaatggaccaacttctttggcaagtggacattttactggctcaaatgtagaagacagaagtagctcagggtcctgggggaatggaggacatccaagcccgtccaggaactatggagatgggactccctatgaccacatgaccagcagggaccttgggtcacatgacaatctctctccaccttttgtcaattccagaatacaaagtaaaacagaaaggggctcatactcatcttatgggagagaatcaaacttacagggttgccaccagcagagtctccttggaggtgacatggatatgggcaacccaggaaccctttcgcccaccaaacctggttcccagtactatcagtattctagcaataatccccgaaggaggcctcttcacagtagtgccatggaggtacagacaaagaaagttcgaaaagttcctccaggtttgccatcttcagtctatgctccatcagcaagcactgccgactacaatagggactcgccaggctatccttcctccaaaccagcaaccagcactttccctagctccttcttcatgcaagatggccatcacagcagtgacccttggagctcctccagtgggatgaatcagcctggctatgcaggaatgttgggcaactcttctcatattccacagtccagcagctactgtagcctgcatccacatgaacgtttgagctatccatcacactcctcagcagacatcaattccagtcttcctccgatgtccactttccatcgtagtggtacaaaccattacagcacctcttcctgtacgcctcctgccaacgggacagacagtataatggcaaatagaggaagcggggcagccggcagctcccagactggagatgctctggggaaagcacttgcttcgatctattctccagatcacactaacaacagcttttcatcaaacccttcaactcctgttggctctcctccatctctctcagcaggcacagctgtttggtctagaaatggaggacaggcctcatcgtctcctaattatgaaggacccttacactctttgcaaagccgaattgaagatcgtttagaaagactggatgatgctattcatgttctccggaaccatgcagtgggcccatccacagctatgcctggtggtcatggggacatgcatggaatcattggaccttctcataatggagccatgggtggtctgggctcagggtatggaaccggccttctttcagccaacagacattcactcatggtggggacccatcgtgaagatggcgtggccctgagaggcagccattctcttctgccaaaccaggttccggttccacagcttcctgtccagtctgcgacttcccctgacctgaacccaccccaggacccttacagaggcatgccaccaggactacaggggcagagtgtctcctctggcagctctgagatcaaatccgatgacgagggtgatgagaacctgcaagacacgaaatcttcggaggacaagaaattagatgacgacaagaaggatatcaaatcaattactagcaataatgacgatgaggacctgacaccagagcagaaggcagagcgtgagaaggagcggaggatggccaacaatgcccgagagcgtctgcgggtccgtgacatcaacgaggctttcaaagagctcggccgcatggtgcagctccacctcaagagtgacaagccccagaccaagctcctgatcctccaccaggcggtggccgtcatcctcagtctggagcagcaagtccgagaaaggaatctgaatccgaaagctgcgtgtctgaaaagaagggaggaagagaaggtgtcctcagagcctccccctctctccttggccggcccacaccctggaatgggagacgcatcgaatcacatgggacagatgtaa

SEQ ID NO: 153 - DNA, 345 bp, Homo sapiens
atggccgagtgcccgacactcggggaggcagtcaccgaccacccggaccgcctgtgggcctgggagaagttcgtgtatttggacgagaagcagcacgcctggctgcccttaaccatcgagataaaggataggttacagttacgggtgctcttgcgtcgggaagacgtcgtcctggggaggcctatgacccccacccagataggcccaagcctgctgcctatcatgtggcagctctaccctgatggacgataccgatcctcagactccagtttctggcgcttagtgtaccacatcaagattgacggcgtggaggacatgcttctcgagctgctgccagatgactga

SEQ ID NO: 154 - DNA, 3297 bp, Homo sapiens
atgctggaaggagatctggtttcaaagatgctacgagctgttctgcagtctcataagaatggagtagcattaccccggctccaaggagagtacagatccttgactggagactggatccccttcaaacagctaggtttccctacactagaagcctatctgagaagtgtgccagcagtggtcaggatagagactagtagatctggagagattacctgctatgccatggcctgcacagaaactgcaagaattgctcagcttgtggctcgtcaaaggagttctaaaaggaaaaccgggcgtcaagttaattgtcagatgagagtgaagaaaaccatgccattttttctagaaggaaaaccaaaagcaaccctcagacaaccaggatttgcttcaaatttttctgttggcaaaaaacctaatccagcaccgttaagagacaaaggaaactctgttggagttaagcctgatgctgaaatgtctccttatatgctacacacaactcttggaaatgaagcattcaaagacattccagtgcaaaggcatgtgaccatgtccaccaacaacaggtttagcccaaaggcgtcccttcaaccacctttgcagatgcatctctcaagaacctctactaaggaaatgagtgataatttaaatcagactgttgaaaaacccaatgtcaagcctcctgcctcttacacttataaaatggatgaggttcaaaatcgcataaaggaaatactaaacaagcataacaatggcatttggatatctaagcttccacatttttacaaagagttatataaagaagaccttaatcaaggaattttacaacagtttgaacactggcctcatatttgcacggtggagaaaccttgcagtggtggccaagatttacttctttatccagctaagagaaagcagcttttgagaagtgaactggatactgagaaagtacctctatccccactacctggtcccaaacaaacaccaccgttgaaagggtgtccaacagttatggcaggagactttaaagaaaaagtggcagacctgctggtgaaatacacaagtggcctttgggccagtgcacttccgaaagcatttgaggaaatgtacaaagtgaaattccctgaggatgccttaaaaaatcttgcctcactttctgatgtatgcagcatagactacatttctggaaatccccagaaggccattctctatgctaaacttccattgcccactgacaaaatccaaaaggatgcagggcaagcacatggtgataatgatatcaaggctatggttgaacaagagtatttgcaggtagaagaaagcattgctgaaagtgctaatacctttatggaggacataacagttcctcctttaatgattccaactgaagcatcaccatctgtattggtggttgaactgagcaacacaaatgaagtggttatcaggtatgtgggcaaagactattctgctgctcaggaattaatggaagatgagatgaaggaatattacagtaagaatcctaagatcacaccagtccaggctgtgaatgttgggcagttgctggccgtaaatgccgaggaggacgcctggttacgggcacaggtcatctcaacagaagagaacaaaataaaggtatgctatgttgactatggttttagtgaaaatgttgaaaaaagcaaagcatacaaattaaacccgaagttttgttcactctcatttcaagctacaaaatgtaagcttgcaggcttggaagtcctaagcgatgaccctgatctagtgaaggtggttgaatctttaacttgtggaaagatctttgcagtggaaatacttgacaaagctgacattccacttgttgttctgtacgatacctcaggagaagatgatatcaatatcaatgccacctgcttgaaggctatatgtgacaagtcactagaggttcacctgcaggttgacgccatgtacacaaatgtcaaagtaactaatatttgctctgatgggacactctactgccaggtgccttgtaagggtctgaacaagctcagtgaccttctacgtaagatagaggactacttccattgcaagcacatgacctctgagtgctttgtttcattacccttctgtgggaaaatctgcctcttccattgcaaaggaaaatggttacgagtagagatcacaaatgttcacagcagccgggctcttgatgttcagttcctggactctggcactgtgacatctgtaaaagtgtcagagctcagggaaattccacctcggtttctacaagaaatgattgcaataccacctcaggccattaagtgctgtttagcagatcttccacaatctattggcatgtggacaccagatgcagtgctgtggttaagagattctgttttgaattgctcggactgtagcattaaggttacaaaagtggatgaaaccagagggatcgcacatgtttatttatttacccctaagaacttccctgaccctcatcgcagtattaatcgccagattacaaatgcagacttgtggaagcatcagaaggatgtgtttttgagtgccatatccagtggagctgactctcccaacagcaaaaatggcaacatgcccatgtcgggcaacactggagagaatttcagaaagaacctcacagatgtcatcaaaaagtccatggtggaccatacgagcgctttctccacagaggaactgccacctcctgtccacttatcaaagccaggggaacacatggatgtgtatgtgcctgtggcctgtcacccaggctacttcgtcatccagccttggcaggagatacataagttggaagttctgatggaagagatgattctatattacagcgtgtctgaagagcgccacatagcagtggagaaagaccaagtgtatgctgcaaaagtggaaaataagtggcacagggtgcttttaaaaggaatcctgaccaatggactggtatctgtgtatgagctggattatggcaaacacgaattagtcaacataagaaaagtacagcccctagtggacatgttccgaaagctgcccttccaagcagtcacagctcaacttgcaggagtgaagtgcaaccagtggtctgaggaggcttctatggtgtttcgaaatcatgtggagaagaaacctctggtggcactggtgcagacagtcattgaaaatgctaacccttgggaccggaaagtagtggtctacttagtggacacatcgttgccagacaccgatacctggattcatgattttatgtcagagtatctgatagagctttcaaaagttaattaa

SEQ ID NO: 155 - DNA, 2556 bp, Homo sapiens
atgacttcccattatgtgattgccatctttgccctgatgagctcctgtttagccactgcaggtccagagcctggtgcactgtgtgaactgtcacctgtcagtgcctcccatcctgtccaggccttgatggagagcttcactgttttgtcaggctgtgccagcagaggcacaactgggctgccacaggaggtgcatgtcctgaatctccgcactgcaggccaggggcctggccagctacagagagaggtcacacttcacctgaatcccatctcctcagtccacatccaccacaagtctgttgtgttcctgctcaactccccacaccccctggtgtggcatctgaagacagagagacttgccactggggtctccagactgtttttggtgtctgagggttctgtggtccagttttcatcagcaaacttctccttgacagcagaaacagaagaaaggaacttcccccatggaaatgaacatctgttaaattgggcccgaaaagagtatggagcagttacttcattcaccgaactcaagatagcaagaaacatttatattaaagtgggggaagatcaagtgttccctccaaagtgcaacatagggaagaattttctctcactcaattaccttgctgagtaccttcaacccaaagcagcagaagggtgtgtgatgtccagccagccccagaatgaggaagtacacatcatcgagctaatcacccccaactctaacccctacagtgctttccaggtggatataacaattgatataagaccttctcaagaggatcttgaagtggtcaaaaatctcatcctgatcttgaagtgcaaaaagtctgtcaactgggtgatcaaatcttttgatgttaagggaagcctgaaaattattgctcctaacagtattggctttggaaaagagagtgaaagatctatgacaatgaccaaatcaataagagatgacattccttcaacccaagggaatctggtgaagtgggctttggacaatggctatagtccaataacttcatacacaatggctcctgtggctaatagatttcatcttcggcttgaaaataatgcagaggagatgggagatgaggaagtccacactattcctcctgagctacggatcctgctggaccctggtgccctgcctgccctgcagaacccgcccatccggggaggggaaggccaaaatggaggccttccgtttcctttcccagatatttccaggagagtctggaatgaagagggagaagatgggctccctcggccaaaggaccctgtcattcccagcatacaactgtttcctggtctcagagagccagaagaggtgcaagggagcgtggatattgccctgtctgtcaaatgtgacaatgagaagatgatcgtggctgtagaaaaagattcttttcaggccagtggctactcggggatggacgtcaccctgttggatcctacctgcaaggccaagatgaatggcacacactttgttttggagtctcctctgaatggctgcggtactcggccccggtggtcagcccttgatggtgtggtctactataactccattgtgatacaggttccagcccttggggacagtagtggttggccagatggttatgaagatctggagtcaggtgataatggatttccgggagatatggatgaaggagatgcttccctgttcacccgacctgaaatcgtggtgtttaattgcagccttcagcaggtgaggaaccccagcagcttccaggaacagccccacggaaacatcaccttcaacatggagctatacaacactgacctctttttggtgccctcccagggcgtcttctctgtgccagagaatggacacgtttatgttgaggtatctgttactaaggctgaacaagaactgggatttgccatccaaacgtgctttatctctccatattcgaaccctgataggatgtctcattacaccattattgagaatatttgtcctaaagatgaatctgtgaaattctacagtcccaagagagtgcactttcctatcccgcaagctgacatggataagaagcgattcagctttgtcttcaagcctgtcttcaacacctcactgctctttctacagtgtgagctgacgctgtgtacgaagatggagaagcacccccagaagttgcctaagtgtgtgcctcctgacgaagcctgcacctcgctggacgcctcgataatctgggccatgatgcagaataagaagacgttcactaagccccttgctgtgatccaccatgaagcagaatctaaagaaaaaggtccaagcatgaaggaaccaaatccaatttctccaccaattttccatggtctggacaccctaaccgtgatgggcattgcgtttgcagcctttgtgatcggagcactcctgacgggggccttgtggtacatctattctcacacaggggagacagcaggaaggcagcaagtccccacctccccgccagcctcggaaaacagcagtgctgcccacagcatcggcagcacgcagagcacgccttgctccagcagcagcacggcctag

SEQ ID NO: 156 - DNA, 2418 bp, Homo sapiens
atggcccagccactggccttcatcctcgatgtccctgagaccccaggggaccagggccagggccccagcccctatgatgaaagcgaagtgcacgactccttccagcagctcatccaggagcagagccagtgcacggcccaggaggggctggagctgcagcagagagagcgggaggtgacaggaagtagccagcagacactctggcggcccgagggcacccagagcacggccacactccgcatcctggccagcatgcccagccgcaccattggccgcagccgaggtgccatcatctcccagtactacaaccgcacggtgcagcttcggtgcaggagcagccggcccctgctcgggaactttgtccgctccgcctggcccagcctccgcctgtacgacctggagctggaccccacggccctggaggaggaggagaagcagagcctcctggtgaaggagctccagagcctggcagtggcacagcgggaccacatgcttcgcgggatgcccttaagcctggctgagaaacgcagcctgcgagagaagagcaggaccccgagggggaagtggaggggccagccgggcagcggcggggtctgctcctgctgtggccggctcagatatgcctgcgtgctggccttgcacagcctgggcctggcgctgctctccgccctgcaggccctgatgccgtggcgctacgccctgaagcgcatcgggggccagttcggctccagcgtgctctcctacttcctctttctcaagaccctgctggctttcaatgccctcctgctgctgctgctggtggccttcatcatgggccctcaggtcgccttcccacccgccctgccgggccctgcccccgtctgcacaggcctggagctcctcacaggcgcgggttgcttcacccacaccgtcatgtactacggccactacagtaacgccacgctgaaccagccgtgtggcagccccctggatggcagccagtgcacacccagggtgggtggcctgccctacaacatgcccctggcctacctctccactgtgggcgtgagcttctttatcacctgcatcaccctggtgtacagcatggctcactctttcggggagagctaccgggtgggcagcacctctggcatccacgccatcaccgtcttctgctcctgggactacaaggtgacgcagaagcgggcctcccgcctccagcaggacaatattcgcacccggctgaaggagctgctggccgagtggcagctgcggcacagccccaggagcgtgtgcgggaggctgcggcaggcggctgtgctggggcttgtgtggctgctgtgtctggggaccgcgctgggctgcgccgtggccgtccacgtcttctcggagttcatgatccagagtccagaggctgctggccaggaggctgtgctgctggtcctgcccctggtggttggcctcctcaacctgggggccccctacctgtgccgtgtcctggccgccctggagccgcatgactccccggtactggaggtgtacgtggccatctgcaggaacctcatcctcaagctggccatcctggggacactgtgctaccactggctgggccgcagggtgggcgtcctgcagggccagtgctgggaggattttgtgggccaggagctgtaccggttcctggtgatggacttcgtcctcatgttgctggacacgctttttggggaactggtgtggaggattatctccgagaagaagctgaagaggaggcggaagccggagtttgacattgcccggaatgtcctggagctgatttatgggcagactctgacctggctgggggtgctcttctcgcccctcctccccgccgtgcagatcatcaagctgctgctcgtcttctatgtcaagaagaccagccttctggccaactgccaggcgccgcgccggccctggctggcctcacacatgagcaccgtcttcctcacgctgctctgcttccccgccttcctgggcgccgctgtcttcctctgctacgccgtctggcaggtgaagccctcgagcacctgcggccccttccggaccctggacaccatgtacgaggccggcagggtgtgggtgcgccacctggaggcggcaggccccagggtctcctggctgccctgggtgcaccggtacctgatggaaaacaccttctttgtcttcctggtgtcagccctgctgctggccgtgatctacctcaacatccaggtggtgcggggccagcgcaaggtcatctgcctgctcaaggagcagatcagcaatgagggtgaggacaaaatcttcttaatcaacaagcttcactccatctacgagaggaaggagagggaggagaggagcagggttgggacaaccgaggaggctgcggcaccccctgccctgctcacagatgaacaggatgcctag

SEQ ID NO: 157 - DNA, 588 bp, Homo sapiens
atgagcgccgcccggccccagttcagcattgatgatgccttcgagctgtccctggaggacgggggccctgggcccgagtccagcggggtcgcgcgctttgggccgctgcacttcgagcgtcgggcccggttcgaggtggctgacgaggacaagcagtcccggctgcgctaccagaacctggagaacgatgaggatggagcccaggcctctccggagccggatgggggagtcggcaccagggattccagccgaacttccatccgcagctcccagtggtccttcagcaccatcagcagcagcacccagcgctcctacaacacctgctgcagctggacccaacaccctttgatccagaagaaccgccgagtggtgctggcctccttcctgctcctgctgctggggctggtgctgatcctggtcggcgtgggactggaggcgaccccctctccaggtgtctccagcgccatcttcttcgtgccgggcttcctgttgttggtgcctggagtctatcacgtgatcttcatctactgcgcggtcaagggccaccggggcttccagttcttctacctgccctacttcgagaagtga

SEQ ID NO: 158 - DNA, 1479 bp, Homo sapiens
atgggaggacgaagaggtcccaacaggacatcttactgtcgaaatccgctctgtgagccgggatcctcggggggctctagtggaagccacacttccagtgcatcggtgaccagtgttcgttcccgcaccaggagcagttctggaacaggcctctccagccctcctctggccacccaaactgttgtgcctctacagcactgcaagatccccgagctgccagtccaggccagcattctgtttgagttgcagctcttcttctgccagctcatagcactcttcgtccactacatcaacatctacaagacagtgtggtggtatccaccttcccacccaccctcccacacctccctgaacttccatctgatcgacttcaacttgctgatggtgaccaccatcgttctgggccgccgcttcattgggtccatcgtgaaggaggcctctcagagggggaaggtctccctctttcgctccatcctgctgttcctcactcgcttcaccgttctcacggcaacaggctggagtctgtgccgatccctcatccacctcttcaggacctactccttcctgaacctcctgttcctctgctatccgtttgggatgtacattccgttcctgcagctgaattgcgacctccgcaagacaagcctcttcaaccacatggcctccatggggccccgggaggcggtcagtggcctggcaaagagccgggactacctcctgacactgcgggagacgtggaagcagcacacaagacagctgtatggcccggacgccatgcccacccatgcctgctgcctgtcacccagcctcatccgcagtgaggtggagttcctcaagatggacttcaactggcgcatgaaggaagtgctcgtcagctccatgctgagcgcctactatgtggcctttgtgcctgtctggttcgtgaagaacacacattactatgacaagcgctggtcctgtgaactcttcctgctggtgtccatcagcacctccgtgatcctcatgcagcacctgctgcctgccagctactgtgacctgctgcacaaggccgccgcccatctgggctgttggcagaaggtggacccagcgctgtgctccaacgtgctgcagcacccgtggactgaagaatgcatgtggccgcagggcgtgctggtgaagcacagcaagaacgtctacaaagccgtaggccactacaacgtggctatcccctctgacgtctcccacttccgcttccatttctttttcagcaaacccctgcggatcctcaacatcctcctgctgctggagggcgctgtcattgtctatcagctgtactccctaatgtcctctgaaaagtggcaccagaccatctcgctggccctcatcctcttcagcaactactatgccttcttcaagctgctccgggaccgcttggtattgggcaaggcctactcatactctgctagcccccagagagacctggaccaccgtttctcctga

SEQ ID NO: 159 - DNA, 906 bp, Homo sapiens
atggagctctctgatgtcaccctcattgagggtgtgggtaatgaggtgatggtggtggcaggtgtggtggtgctgattctagccttggtcctagcttggctctctacctacgtagcagacagcggtagcaaccagctcctgggcgctattgtgtcagcaggcgacacatccgtcctccacctggggcatgtggaccacctggtggcaggccaaggcaaccccgagccaactgaactcccccatccatcagagggtaatgatgagaaggctgaagaggcgggtgaaggtcggggagactccactggggaggctggagctgggggtggtgttgagcccagccttgagcatctccttgacatccaaggcctgcccaaaagacaagcaggtgcaggcagcagcagtccagaggcccccctgagatctgaggatagcacctgcctccctcccagccctggcctcatcactgtgcggctcaaattcctcaatgataccgaggagctggctgtggctaggccagaggataccgtgggtgccctgaagagcaaatacttccctggacaagaaagccagatgaaactgatctaccagggccgcctgctacaagacccagcccgcacactgcgttctctgaacattaccgacaactgtgtgattcactgccaccgctcacccccagggtcagctgttccaggcccctcagcctccttggccccctcggccactgagccacccagccttggtgtcaatgtgggcagcctcatggtgcctgtctttgtggtgctgttgggtgtggtctggtacttccgaatcaattaccgccaattcttcacagcacctgccactgtctccctggtgggagtcaccgtcttcttcagcttcctagtatttgggatgtatggacgataa

SEQ ID NO: 160 - DNA, 4866 bp, Homo sapiens
atggccaagtcgggtggctgcggcgcgggagccggcgtgggcggcggcaacggggcactgacctgggtgaacaatgctgcaaaaaaagaagagtcagaaactgccaacaaaaatgattcttcaaagaagttgtctgttgagagagtgtatcagaagaagacacaacttgaacacattcttcttcgtcctgatacatatattgggtcagtggagccattgacgcagttcatgtgggtgtatgatgaagatgtaggaatgaattgcagggaggttacctttgtgccaggtttatacaagatctttgatgaaattttggttaatgctgctgacaataaacagagggataagaacatgacttgtattaaagtttctattgatcctgaatctaacattataagcatttggaataatgggaaaggcattccagtagtagaacacaaggtagagaaagtttatgttcctgctttaatttttggacagcttttaacatccagtaactatgatgatgatgagaaaaaagttacaggtggtcgtaatggttatggtgcaaaactttgtaatattttcagtacaaagtttacagtagaaacagcttgcaaagaatacaaacacagttttaagcagacatggatgaataatatgatgaagacttctgaagccaaaattaaacattttgatggtgaagattacacatgcataacattccaaccagatctgtccaaatttaagatggaaaaacttgacaaggatattgtggccctcatgactagaagggcatatgatttggctggttcgtgtagaggggtcaaggtcatgtttaatggaaagaaattgcctgtaaatggatttcgcagttatgtagatctttatgtgaaagacaaattggatgaaactggggtggccctgaaagttattcatgagcttgcaaatgaaagatgggatgtttgtctcacattgagtgaaaaaggattccagcaaatcagctttgtaaatagtattgcaactacaaaaggtggacggcacgtggattatgtggtagatcaagttgttggtaaactgattgaagtagttaagaaaaagaacaaagctggtgtatcagtgaaaccatttcaagtaaaaaaccatatatgggtttttattaattgccttattgaaaatccaacttttgattctcagactaaggaaaacatgactctgcagcccaaaagttttgggtctaaatgccagctgtcagaaaaattttttaaagcagcctctaattgtggcattgtagaaagtatcctgaactgggtgaaatttaaggctcagactcagctgaataagaagtgttcatcagtaaaatacagtaaaatcaaaggtattcccaaactggatgatgctaatgatgctggtggtaaacattccctggagtgtacactgatattaacagagggagactctgccaaatcactggctgtgtctggattaggtgtgattggacgagacagatacggagtttttccactcaggggcaaaattcttaatgtacgggaagcttctcataaacagatcatggaaaatgctgaaataaataatattattaaaatagttggtctacaatataagaaaagttacgatgatgcagaatctctgaaaaccttacgctatggaaagattatgattatgaccgatcaggatcaagatggttctcacataaaaggcctgcttattaatttcatccatcacaattggccatcacttttgaagcatggttttcttgaagagttcattactcctattgtaaaggcaagcaaaaataagcaggaactttccttctacagtattcctgaatttgacgaatggaaaaaacatatagaaaaccagaaagcctggaaaataaagtactataaaggattgggtactagtacagctaaagaagcaaaggaatattttgctgatatggaaaggcatcgcatcttgtttagatatgctggtcctgaagatgatgctgccattaccttggcatttagtaagaagaagattgatgacagaaaagaatggttaacaaattttatggaagaccggagacagcgtaggctacatggcttaccagagcaatttttatatggtactgcaacaaagcatttgacttataatgatttcatcaacaaggaattgattctcttctcaaactcagacaatgaaagatctataccatctcttgttgatggctttaaacctggccagcggaaagttttatttacctgtttcaagaggaatgataaacgtgaagtaaaagttgcccagttggctggctctgttgctgagatgtcggcttatcatcatggagaacaagcattgatgatgactattgtgaatttggctcagaactttgtgggaagtaacaacattaacttgcttcagcctattggtcagtttggaactcggcttcatggtggcaaagatgctgcaagccctcgttatattttcacaatgttaagcactttagcaaggctactttttcctgctgtggatgacaacctccttaagttcctttatgatgataatcaacgtgtagagcctgagtggtatattcctataattcccatggttttaataaatggtgctgagggcattggtactggatgggcttgtaaactacccaactatgatgctagggaaattgtgaacaatgtcagacgaatgctagatggcctggatcctcatcccatgcttccaaactacaaaaactttaaaggcacgattcaagaacttggtcaaaaccagtatgcagtcagtggtgaaatatttgtagtggacagaaacacagtagaaattacagagcttccagttagaacttggacacaggtatataaagaacaggttttagaacctatgctaaatggaacagataaaacaccagcattaatttctgattataaagaatatcatactgacacaactgtgaaatttgtggtgaaaatgactgaagagaaactagcacaagcagaagctgctggactgcataaagtttttaaacttcaaactactcttacttgtaattccatggtactttttgatcatatgggatgtctgaagaaatatgaaactgtgcaagacattctgaaagaattctttgatttacgattaagttattacggtttacgtaaggagtggcttgtgggaatgttgggagcagaatctacaaagcttaacaatcaagcccgtttcattttagagaagatacaagggaaaattactatagagaataggtcaaagaaagatttgattcaaatgttagtccagagaggttatgaatctgacccagtgaaagcctggaaagaagcacaagaaaaggcagcagaagaggatgaaacacaaaaccagcatgatgatagttcctccgattcaggaactccttcaggcccagattttaattatattttaaatatgtctctgtggtctcttactaaagaaaaagttgaagaactgattaaacagagagatgcaaaagggcgagaggtcaatgatcttaaaagaaaatctccttcagatctttggaaagaggatttagcggcatttgttgaagaactggataaagtggaatctcaagaacgagaagatgttctggctggaatgtctggaaaagcaattaaaggtaaagttggcaaacctaaggtgaagaaactccagttggaagagacaatgccctcaccttatggcagaagaataattcctgaaattacagctatgaaggcagatgccagcaaaaagttgctgaagaagaagaagggtgatcttgatactgcagcagtaaaagtggaatttgatgaagaattcagtggagcaccagtagaaggtgcaggagaagaggcattgactccatcagttcctataaataaaggtcccaaacctaagagggagaagaaggagcctggtaccagagtgagaaaaacacctacatcatctggtaaacctagtgcaaagaaagtgaagaaacggaatccttggtcagatgatgaatccaagtcagaaagtgatttggaagaaacagaacctgtggttattccaagagattctttgcttaggagagcagcagccgaaagacctaaatacacatttgatttctcagaagaagaggatgatgatgctgatgatgatgatgatgacaataatgatttagaggaattgaaagttaaagcatctcccataacaaatgatggggaagatgaatttgttccttcagatgggttagataaagatgaatatacattttcaccaggcaaatcaaaagccactccagaaaaatctttgcatgacaaaaaaagtcaggattttggaaatctcttctcatttccttcatattctcagaagtcagaagatgattcagctaaatttgacagtaatgaagaagattctgcttctgttttttcaccatcatttggtctgaaacagacagataaagttccaagtaaaacggtagctgctaaaaagggaaaaccgtcttcagatacagtccctaagcccaagagagccccaaaacagaagaaagtagtagaggctgtaaactctgactcggattcagaatttggcattccaaagaagactacaacaccaaaaggtaaaggccgaggggcaaagaaaaggaaagcatctggctctgaaaatgaaggcgattataaccctggcaggaaaacatccaaaacaacaagcaagaaaccgaagaagacatcttttgatcaggattcagatgtggacatcttcccctcagacttccctactgagccaccttctctgccacgaaccggtcgggctaggaaagaagtaaaatattttgcagagtctgatgaagaagaagatgatgttgattttgcaatgtttaattaa

SEQ ID NO: 161 - DNA, 732 bp, Homo sapiens
atggagcatgcctttaccccgttggagcccctgctttccactgggaatttgaagtactgccttgtaattcttaatcagcctttggacaactattttcgtcatctttggaacaaagctcttttaagagcctgtgccgatggaggtgccaaccgcttatatgatatcaccgaaggagagagagaaagctttttgcctgaattcatcaatggagactttgattctattaggcctgaagtcagagaatactatgctactaagggatgtgagctcatttcaactcctgatcaagaccacactgactttactaagtgccttaaaatgctccaaaagaagatagaagaaaaagacttaaaggttgatgtgatcgtgacactgggaggccttgctgggcgttttgaccagattatggcatctgtgaataccttgttccaagcgactcacatcactccttttccaattataataatccaagaggaatcgctgatctacctgctccaaccaggaaagcacaggttgcatgtagacactggaatggagggtgattggtgtggccttattcctgttggacagccttgtatgcaggttacaaccacaggcctcaagtggaacctcacaaatgatgtgcttgcttttggaacattggtcagtacttccaatacctacgacgggtctggtgttgtgactgtggaaactgaccacccactcctctggaccatggccatcaaaagctaa

SEQ ID NO: 162 - DNA, 1134 bp, Homo sapiens
atgcgcctgtcggtgcggagggtgctgctggcagccggctgcgccctggtcctggtgctggcggttcagctgggacagcaggtgctagagtgccgggcggtgctggcgggcctgcggagcccccggggggccatgcggcctgagcaggaggagctggtgatggtgggcaccaaccacgtggaataccgctatggcaaggccatgccgctcatcttcgtgggtggcgtgcctcgcagtggcaccacgttgatgcgcgccatgctggacgcgcaccccgaggtgcgctgcggcgaggagacccgcatcatcccgcgcgtgctggccatgcgccaggcctggtccaagtctggccgtgagaagctgcggctggatgaggcgggggtgacggatgaggtgctggacgccgccatgcaggccttcatcctggaggtgattgccaagcacggagagccggcccgcgtgctctgcaacaaggacccatttacgctcaagtcctcggtctacctgtcgcgcctgttccccaactccaagttcctgctgatggtgcgggacggccgggcctccgtgcactccatgatcacgcgcaaagtcaccattgcgggctttgacctcagcagctaccgtgactgcctcaccaagtggaacaaggccatcgaggtgatgtacgcccagtgcatggaggtaggcaaggagaagtgcctgcctgtgtactacgagcagctggtgctgcaccccaggcgctcactcaagctcatcctcgacttcctcggcatcgcctggagcgacgctgtcctccaccatgaagacctcattggcaagcccggtggtgtctccctgtccaagatcgagcggtccacggaccaggtcatcaagcctgttaacctggaagcgctctccaagtggactggccacatccctggggatgtggtgcgggacatggcccagatcgcccccatgctggctcagctcggctatgacccttatgcaaacccccccaactatggcaaccctgaccccttcgtcatcaacaacacacagcgggtcttgaaaggggactataaaacaccagccaatctgaaaggatattttcaggtgaaccagaacagcacctcctcccacttaggaagctcgtga

SEQ ID NO: 163 - DNA, 1656 bp, Homo sapiens
atgatcagcccagaccccaggccctcccctggcttggcccggtgggctgagagctatgaggccaagtgtgagcgcaggcaagagatccgtgaaagccgccgctgccgtcccaatgtgaccacttgccgccaggtggggaagacgctgaggatccaacagagagagcagctccagagagctcgactgcagcagttcttcaggaggaggaacctggagctagaggagaagggcaaagcgcagcatccccaggccagggagcaagggccctccaggcggccaggacaggtgactgtcctcaaggaacccttgtcttgtgccagaaggatttcttctcccagagagcaggtgacaggcaccagctctgaagtctttccagcccagcatcctcctccctcaggcatctgcagggatctgtctgaccacctctcctcacaggctgggggccttcctccacaggacactcccatcaagaagccacccaaacaccaccgtggtactcagacaaaggcagaaggaccaacaattaagaacgatgccagtcagcaaaccaattacggagttgcagttctggataaggaaatcatccagctttctgattacctcaaagaggccctacaaagggagctggtcctaaaacagaaaatggtgattctccaagacctactgtccactctgattcaggcctctgacagctcttggaagggacagcttaatgaagacaaactgaaggggaaactgagatccttagaaaaccagctatacacctgtacccagaaatactccccttggggaatgaaaaaagtactactggagatggaagaccagaaaaacagctatgagcagaaggccaaggagtcactgcagaaagtgctggaggagaaaatgaatgcagagcagcaactacagagcacacagcgatccctggccctggcagagcagaagtgtgaagagtggaggagccagtatgaggctctgaaggaggactggaggacccttgggacccagcacagggagctggagagccaactccacgtgcttcagtccaaactgcagggagcagatagcagggacttacagatgaaccaggccctgcgatttttggaaaatgagcaccagcaactgcaggccaagattgaatgcctgcaaggggacagagacctgtgcagcttggatacccaggacctacaagatcaactaaaaaggtcagaggcagagaaactcaccctggtgaccagagtacagcagttgcagggtttgcttcaaaatcaatccttacagcttcaagaacaggagaaactcttaacaaagaaagatcaggctttgcccgtgtggagtccaaagtccttccctaacgaagtggagcctgagggtacagggaaggagaaagactgggatctcagagaccagctgcaaaagaagactttgcagctccaggccaaggaaaaggagtgcagagaactgcattcagaattagacaacctcagtgacgagtatctctcctgcctgcgtaagctgcagcactgtcgagaagagctgaaccagagccagcagctgcctcccagaaggcaatgtgggcgatggctcccagtgctgatggtggtgattgctgcagcactggcagtgttcctggccaataaagacaacctgatgatctga

SEQ ID NO: 164 - DNA, 318 bp, Homo sapiens
atggtgaagcagatcgagagcaagactgcttttcaggaagccttggacgctgcaggtgataaacttgtagtagttgacttctcagccacgtggtgtgggccttgcaaaatgatcaagcctttctttcattccctctctgaaaagtattccaacgtgatattccttgaagtagatgtggatgactgtcaggatgttgcttcagagtgtgaagtcaaatgcatgccaacattccagttttttaagaagggacaaaaggtgggtgaattttctggagccaataaggaaaagcttgaagccaccattaatgaattagtctaa

SEQ ID NO: 165 - DNA, 444 bp, Homo sapiens
atggctctgaagagaatccacaaggaattgaatgatctggcacgggaccctccagcacagtgttcagcaggtcctgttggagatgatatgttccattggcaagctacaataatggggccaaatgacagtccctatcagggtggagtatttttcttgacaattcatttcccaacagattaccccttcaaaccacctaaggttgcatttacaacaagaatttatcatccaaatattaacagtaatggcagcatttgtcttgatattctacgatcacagtggtctccagcactaactatttcaaaagtactcttgtccatctgttctctgttgtgtgatcccaatccagatgatcctttagtgcctgagattgctcggatctacaaaacagatagagaaaagtacaacagaatagctcgggaatggactcagaagtatgcgatgtaa

SEQ ID NO: 166 - DNA, 462 bp, Homo sapiens
atgatggcgagcatgcgagtggtgaaggagctggaggatcttcagaagaagcctcccccatacctgcggaacctgtccagcgatgatgccaatgtcctggtgtggcacgctctcctcctacccgaccaacctccctaccacctgaaagccttcaacctgcgcatcagcttcccgccggagtatccgttcaagcctcccatgatcaaattcacaaccaagatctaccaccccaacgtggacgagaacggacagatttgcctgcccatcatcagcagtgagaactggaagccttgcaccaagacttgccaagtcctggaggccctcaatgtgctggtgaatagaccgaatatcagggagcccctgcggatggacctcgctgacctgctgacacagaatccggagctgttcagaaagaatgccgaagagttcaccctccgattcggagtggaccggccctcctaa

SEQ ID NO: 167 - DNA, 5268 bp, Homo sapiens
atggcgtcggagctagagccagaggtgcaggccatcgaccggagcttgctggaatgttcggccgaggagattgcggggaaatggctgcaagcaactgacctcactagagaagtgtaccagcatttagcccactatgtacccaaaatctactgcaggggtcccaacccttttccacagaaagaagacatgctggcacagcatgttttgttgggaccaatggaatggtacctttgtggtgaagatcctgcatttggatttccaaaacttgagcaagcaaacaaaccttctcatctttgtggtcgtgtttttaaagtaggagagcctacatattcttgcagagactgtgcagttgatccaacttgtgttttgtgcatggagtgctttttgggaagtattcacagagatcatcgatataggatgacaacatcaggaggtggaggtttctgtgactgtggtgatactgaagcctggaaagagggtccttactgtcaaaaacatgaacttaacacctctgaaattgaggaagaagaggatcctcttgttcatttatcagaagatgtgatagcaagaacttataacatttttgctattacgtttcggtatgcagtagaaatattaacctgggaaaaagaaagtgaattgccagcagatttagagatggtagagaagagtgacacctactattgcatgctgtttaatgatgaggttcacacctatgaacaagttatttatactcttcagaaagctgttaactgtacacaaaaagaagctattggttttgcaactacagtagatcgagatgggcgtaggtctgttcgatatggagattttcagtattgtgagcaagcaaaatcagtaattgtgagaaataccagtagacagacaaagccactcaaagttcaagttatgcattcgtctattgtcgcacatcagaattttggtttgaaacttttgtcttggctgggaagtattattggatattcagatggccttcgccggattttatgtcaagttggtttacaagaagggccagatggtgaaaactcttctctagtggacagactgatgcttagtgattccaaattatggaaaggtgctaggagtgtatatcatcagttgttcatgagcagtctgcttatggatttgaaatacaagaaactatttgctgttcgatttgcaaaaaattaccagcagttgcagagagattttatggaggatgatcacgagcgagcagtgtcggtgactgctctatctgtccagttcttcaccgcacctactctggctcgaatgctcatcacagaagaaaacttaatgagcattatcattaagacttttatggatcatttgagacatcgagatgcccagggcagatttcagtttgaacgatacactgctttacaagccttcaaatttaggagagtacagagccttattttagatctcaagtatgtgttaattagcaaaccaactgaatggtcagatgagctgaggcagaagttcctagaagggtttgatgcctttttggaattactaaaatgtatgcagggaatggatccaattacacgtcaagtaggacaacatattgaaatggaaccagagtgggaagcagccttcacactacaaatgaaattaacacatgtcatttcaatgatgcaggactggtgtgcttcagatgaaaaagtgttaatcgaagcttacaagaaatgtctcgctgtactgatgcagtgtcatggtggttatactgatggtgaacagccaatcacactaagcatttgtggacattcagtggaaactatcagatactgtgtttcccaagaaaaagttagcattcacctcccagtttctcgcttacttgcaggtttacatgtattattaagcaaaagtgaagtggcatataaatttccagagctcctacctctaagtgaacttagcccacccatgttgatagaacaccctcttagatgtcttgttctgtgtgcccaagtacatgccggaatgtggagaagaaatgggttctctctagtaaaccagatttattactaccataatgtgaaatgcagacgtgagatgtttgacaaggatgtagtaatgcttcagacaggtgtctccatgatggatccaaatcatttcctgatgatcatgctcagccgctttgaactttatcagattttcagtactccagactatggaaaaagatttagttctgagattacccataaggatgttgttcagcagaacaatactctaatagaagaaatgctatacctcattataatgcttgttggagagagatttagtcctggagttggacaggtaaatgctacagatgaaatcaagcgagagattatccatcagttgagtatcaagcctatggctcatagtgaattggtaaagtctttacctgaagatgagaacaaggagactggcatggagagtgtaatcgaagcagttgcccatttcaagaaacctggattaacaggacgaggcatgtatgaactgaaaccagaatgtgccaaagagttcaacttgtatttctatcacttttcaagggcagaacagtccaaggcagaagaagcgcaacggaaattgaaaagacaaaatagagaagatacagcactcccacctccggtgttgcctccattctgccctctgtttgcaagcctggttaacattttgcagtcagatgtcatgttgtgcatcatgggaacaattctgcaatgggctgtggaacataatggatatgcctggtcagagtccatgctgcaaagggtgttacatttaattggcatggcactacaagaagaaaaacaacatttagagaatgtcacggaagagcatgtagtaacatttaccttcactcagaagatatcaaaacctggtgaagcgccaaaaaattctcctagcatactagctatgctggaaacactacaaaatgctccctacctagaagtccacaaagacatgattcggtggatattgaagacttttaatgctgttaaaaagatgagggagagttcacctaccagtcccgtggcagagacagaaggaaccataatggaagagagttcaagggacaaagacaaagctgagaggaagagaaaagcagagattgccagactgcgcagagaaaagatcatggctcagatgtctgaaatgcagcggcattttattgatgaaaacaaagaactctttcagcagacattagaactggatgcctcaacctctgctgttcttgatcatagccctgtggcttcagatatgacacttacagcactgggccccgcacaaactcaggttcctgaacaaagacaattcgttacatgtatattgtgtcaagaggagcaagaagttaaagtggaaagcagggcaatggtcttggcagcatttgttcagagatcaactgtattatcaaaaaacagaagtaaatttattcaagatccagaaaaatatgatccattattcatgcaccctgatctgtcttgtggaacacacactagtagctgtgggcacattatgcatgcccattgttggcaaaggtattttgattccgttcaagctaaagaacagcgaaggcaacagagattacgcttacatacgagctatgatgtagaaaacggagaattcctttgccccctttgtgaatgcttgagtaatactgttattcctctgctgcttcctccaagaaatatttttaacaacaggttaaatttttcagaccaaccaaatctgactcagtggattagaacaatatctcagcaaataaaagcattacagtttcttaggaaagaagaaagtactcctaataatgcctctacaaagaattcagaaaatgtggatgaattacagctccctgaagggttcaggcctgattttcgtcctaagatcccttattctgagagcataaaagaaatgctaacgacatttggaactgctacctacaaggtgggactaaaggttcatcccaatgaagaggatcctcgtgttcccataatgtgttggggtagctgcgcgtacaccatccaaagcatagaaagaattttgagtgatgaagataaaccattgtttggtcctttaccttgcagactggatgactgtcttaggtcattgacgagatttgccgcagcacactggacagtggcatcagtttcagtggtgcaaggacatttttgtaaactttttgcatcactggtgcctaatgacagccatgaggaacttccatgcatattagatattgacatgtttcatttattggtgggcttggtgcttgcatttcctgcgttgcagtgtcaggatttttcagggatcagccttggcactggagaccttcacattttccatctggttactatggcacacatcatacagatcttacttacctcatgtacagaagagaatggcatggatcaagaaaatcccccttgtgaagaagaatcagcagttcttgctttgtataaaacacttcaccagtatacgggaagtgccttgaaagaaataccatccggctggcatctgtggaggagtgtcagagctggaatcatgcctttcctgaagtgttctgctttattttttcattacttaaatggagttccttccccacccgacattcaagttcctggaacaagccattttgaacatttatgtagctatctttccctaccaaacaacctcatttgcctttttcaagaaaatagtgagataatgaattcactgattgaaagttggtgccgtaacagtgaagttaaaagatatctagaaggtgaaagagatgctataagatatccaagagaatctaacaaattaataaaccttccagaggattacagcagcctcattaatcaagcatccaatttctcgtgcccgaaatcaggtggtgataagagcagagccccaactctgtgccttgtgtgcggatctctgctgtgctcccagagttactgctgccagactgaactggaaggggaggatgtaggagcctgcacagctcacacctactcctgtggctctggagtgggcatcttcctgagagtacgggaatgtcaggtgctatttttagctggcaaaaccaaaggctgtttttattctcctccttaccttgatgactatggggagaccgaccagggactcagacggggaaatcctttacatttatgcaaagagcgattcaagaagattcagaagctctggcaccaacacagtgtcacagaggaaattggacatgcacaggaagccaatcagacactggttggcattgactggcaacatttataa

SEQ ID NO: 168 - DNA, 1098 bp, Homo sapiens
atgccaggggggaagaaggtggctgggggtggcagcagcggtgccactccaacgtccgctgcggccaccgccccctctggggtcaggcgtttggagaccagcgaaggaacctcagcccagagagatgaggagccagaagaggaaggggaagaggacctgcgagacggaggcgtccccttctttgtcaaccggggtgggctacctgtggatgaggccacctgggaaaggatgtggaaacacgtggccaagatccaccccgatggagagaaggtggcgcaacggatccgtggggccacagacctgcccaagatccccataccgagtgtgcctacgttccagccgtctacacctgtccctgagcgcctggaagctgtgcagcgctacatcagagagctgcagtacaatcacacagggacacagttctttgaaattaagaagagcagacctctgacagggctgatggacctggccaaggaaatgaccaaagaggccctgccaatcaaatgcctggaagccgtgatcctgggaatttacctcaccaacagcatgcccaccctggagcgcttccccatcagcttcaagacctacttctcagggaactacttccgccacatcgtgctgggggtgaacttcgcgggccgctacggtgcgctgggcatgagtcggcgcgaggacctgatgtacaagccgcccgccttccgcacgctcagcgagctcgtgctggacttcgaggccgcctacggccgctgctggcacgtgctcaagaaggtgaagctgggccagagcgtgtcacacgacccgcacagcgtggagcagatcgagtggaagcactcggtgctggacgtggagcgcctgggccgcgatgacttccgcaaggagctggagcgccacgcccgcgacatgcggctcaagattggcaaagggacgggccctccctctcccaccaaggaccggaagaaggatgtttcttccccgcagcgggcccagtccagcccccaccgcaggaacagccgcagtgaaagacggccctcgggtgacaagaagacttccgagcccaaagccatgccagaccttaacgggtaccagatccgggtctga

SEQ ID NO: 169 - DNA, 372 bp, Homo sapiens
atggcctgccggtgcctcagcttccttctgatggggaccttcctgtcagtttcccagacagtcctggcccagctggatgcactgctggtcttcccaggccaagtggctcaactctcctgcacgctcagcccccagcacgtcaccatcagggactacggtgtgtcctggtaccagcagcgggcaggcagtgcccctcgatatctcctctactaccgctcggaggaggatcaccaccggcctgctgacatccccgatcgattctcggcagccaaggatgaggcccacaatgcctgtgtcctcaccattagtcccgtgcagcctgaagacgacgcggattactactgctctgttggctacggctttagtccctag

SEQ ID NO: 170 - DNA, 2391 bp, Homo sapiens
atgcctacaacacagcagtcccctcaggatgagcaggaaaagctcttggatgaagccatacaggctgtgaaggtccagtcattccaaatgaagagatgcctggacaaaaacaagcttatggatgctctaaaacatgcttctaatatgcttggtgaactccggacttctatgttatcaccaaagagttactatgaactttatatggccatttctgatgaactgcactacttggaggtctacctgacagatgagtttgctaaaggaaggaaagtggcagatctctacgaacttgtacagtatgctggaaacattatcccaaggctttaccttttgatcacagttggagttgtatatgtcaagtcatttcctcagtccaggaaggatattttgaaagatttggtagaaatgtgccgtggtgtgcaacatcccttgaggggtctgtttcttcgaaattaccttcttcagtgtaccagaaatatcttacctgatgaaggagagccaacagatgaagaaacaactggtgacatcagtgattccatggattttgtactgctcaactttgcagaaatgaacaagctctgggtgcgaatgcagcatcagggacatagccgagatagagaaaaaagagaacgagaaagacaagaactgagaattttagtgggaacaaatttggtgcgcctcagtcagttggaaggtgtaaatgtggaacgttacaaacagattgttttgactggcatattggagcaagttgtaaactgtagggatgctttggctcaagaatatctcatggagtgtattattcaggttttccctgatgaatttcacctccagactttgaatccttttcttcgggcctgtgctgagttacaccagaatgtaaatgtgaagaacataatcattgctttaattgatagattagctttatttgctcaccgtgaagatggacctggaatcccagcggatattaaactttttgatatattttcacagcaggtggctacagtgatacagtctagacaagacatgccttcagaggatgttgtatctttacaagtctctctgattaatcttgccatgaaatgttaccctgatcgtgtggactatgttgataaagttctagaaacaacagtggagatattcaataagctcaaccttgaacatattgctaccagtagtgcagtttcaaaggaactcaccagacttttgaaaataccagttgacacttacaacaatattttaacagtcttgaaattaaaacattttcacccactctttgagtactttgactacgagtccagaaagagcatgagttgttatgtgcttagtaatgttctggattataacacagaaattgtctctcaagaccaggtggattccataatgaatttggtatccacgttgattcaagatcagccagatcaacctgtagaagaccctgatccagaagattttgctgatgagcagagccttgtgggccgcttcattcatctgctgcgctctgaggaccctgaccagcagtacttgattttgaacacagcacgaaaacattttggagctggtggaaatcagcggattcgcttcacactgccacctttggtatttgcagcttaccagctggcttttcgatataaagagaattctaaagtggatgacaaatgggaaaagaaatgccagaagattttttcatttgcccaccagactatcagtgctttgatcaaagcagagctggcagaattgcccttaagactttttcttcaaggagcactagctgctggggaaattggttttgaaaatcatgagacagtcgcatatgaattcatgtcccaggcattttctctgtatgaagatgaaatcagcgattccaaagcacagctagctgccatcaccttgatcattggcacttttgaaaggatgaagtgcttcagtgaagagaatcacgaacctctgaggactcagtgtgcccttgctgcatccaaacttctaaagaaacctgatcagggccgagctgtgagcacctgtgcacatctcttctggtctggcagaaacacggacaaaaatggggaggagcttcacggaggcaagagggtaatggagtgcctaaaaaaagctctaaaaatagcaaatcagtgcatggacccctctctacaagtgcagctttttatagaaattctgaacagatatatctatttttatgaaaaggaaaatgatgcggtaacaattcaggttttaaaccagcttatccaaaagattcgagaagacctcccgaatcttgaatccagtgaagaaacagagcagattaacaaacattttcataacacactggagcatttgcgcttgcggcgggaatcaccagaatccgaggggccaatttatgaaggtctcatcctttaa

SEQ ID NO: 171 - DNA, 918 bp, Homo sapiens
atgaccaaccagtacggtattctcttcaaacaagagcaagcccatgatgatgccatttggtcagttgcttgggggacaaacaagaaggaaaactctgagacagtggtcacaggctccctagatgacctggtgaaggtctggaaatggcgtgatgagaggctggacctacagtggagtctggagggacatcagctgggagtggtgtctgtggacatcagccacaccctgcccattgctgcatccagctctcttgatgctcatattcgtctttgggacttggaaaatggcaaacagataaagtccatagatgcaggacctgtggatgcctggactttggccttttctcctgattcccagtatctggccacaggaactcatgtcgggaaagtgaacatttttggtgtggaaagtgggaaaaaggaatattctttggacacgagaggaaaattcattcttagtattgcatatagtcctgatgggaaatacctagccagtggagccatagatggaatcatcaatatttttgatattgcaactggaaaacttctgcataccctggaaggccatgccatgcccattcgctccttgaccttttccccggactcccagctccttgtcactgcttcagatgatggctacatcaagatctatgatgtacaacatgccaatttggctggcacgctgagcggccatgcctcctgggtgctgaacgttgcattctgtcctgatgacactcactttgtttccagttcgtctgacaaaagtgtaaaagtttgggatgttggaacgaggacttgtgttcacaccttctttgatcaccaggatcaggtctggggagtaaaatacaatggaaatggttcaaaaattgtgtctgttggagatgaccaggaaattcacatctatgattgtccaatttaa

SEQ ID NO: 172 - DNA, 2823 bp, Homo sapiens
atggctcggaaacgcgcggccggcggggagccgcggggacgcgaactgcgcagccagaaatccaaggccaagagcaaggcccggcgtgaggaggaggaggaggatgcctttgaagatgagaaacccccaaagaagagccttctctccaaagtttcacaaggaaagaggaaaagaggctgcagtcatcctgggggttcagcagatggtccagcaaaaaagaaagtggccaaggtgactgttaaatctgaaaacctcaaggttataaaggatgaagccctcagcgatggggatgacctcagggactttccaagtgacctcaagaaggcacaccatctgaagagaggggctaccatgaatgaagacagcaatgaagaagaggaagaaagtgaaaatgattgggaagaggttgaagaacttagtgagcctgtgctgggtgacgtgagagaaagtacagccttctctcgatctcttctgcctgtgaagccagtggagatagagattgaaacgccagagcaggcgaagacaagagaaagaagtgaaaagataaaactggagtttgagacatatcttcggagggcgatgaaacgtttcaataaaggggtccatgaggacacacacaaggttcaccttctctgcctgctagcaaatggcttctatcgaaataacatctgcagccagccagatctgcatgctattggcctgtccatcatcccagcccgctttaccagagtgctgcctcgagatgtggacacctactacctctcaaacctggtgaagtggttcattggaacatttacagttaatgcagaactttcagccagtgaacaagataacctgcagactacattggaaaggagatttgctatttactctgctcgagatgatgaggaattggtccatatattcttactgattctccgggctctgcagctcttgacccggctggtattgtctctacagccaattcctctgaagtcagcaacagcaaagggaaagaaaccttccaaggaaagattgactgcggatccaggaggctcctcagaaacttccagccaagttctagaaaaccacaccaaaccaaagaccagcaaaggaaccaaacaagaggaaacctttgctaagggcacctgcaggccaagtgccaaagggaagaggaacaagggaggcagaaagaaacggagcaagccctcctccagcgaggaagatgagggcccaggagacaagcaggagaaggcaacccagcgacgtccgcatggccgggagcggcgggtggcctccagggtgtcttataaagaggagagtgggagtgatgaggctggcagcggctctgattttgagctctccagtggagaagcctctgatccctctgatgaggattccgaacctggccctccaaagcagaggaaagcccccgctcctcagaggacaaaggctgggtccaagagtgcctccaggacccatcgtgggagccatcgtaaggacccaagcttgccagcggcatcctcaagctcttcaagcagtaaaagaggcaagaaaatgtgcagcgatggtgagaaggcagaaaaaagaagcatagctggtatagaccagtggctagaggtgttctgtgagcaggaggaaaagtgggtatgtgtagactgtgtgcacggtgtggtgggccagcctctgacctgttacaagtacgccaccaagcccatgacctatgtggtgggcattgacagtgacggctgggtccgagatgtcacacagaggtacgacccagtctggatgacagtgacccgcaagtgccgggttgatgctgagtggtgggccgagaccttgagaccataccagagcccatttatggacagggagaagaaagaagacttggagtttcaggctaaacacatggaccagcctttgcccactgccattggcttatataagaaccaccctctgtatgccctgaagcggcatctcctgaaatatgaggccatctatcccgagacagctgccatccttgggtattgtcgtggagaagcggtctactccagggattgtgtgcacactctgcattccagggacacgtggctgaagaaagcaagagtggtgaggcttggagaagtaccctacaagatggtgaaaggcttttctaaccgtgctcggaaagcccgacttgctgagccccagctgcgggaagaaaatgacctgggcctgtttggctactggcagacagaggagtatcagcccccagtggccgtggacgggaaggtgccccggaacgagtttgggaatgtgtacctcttcctgcccagcatgatgcctattggctgtgtccagctgaacctgcccaatctacaccgcgtggcccgcaagctggacatcgactgtgtccaggccatcactggctttgatttccatggcggctactcccatcccgtgactgatggatacatcgtctgcgaggaattcaaagacgtgctcctgactgcctgggaaaatgagcaggcagtcattgaaaggaaggagaaggagaaaaaggagaagcgggctctagggaactggaagttgctggccaaaggtctgctcatcagggagaggctgaagcgtcgctacgggcccaagagtgaggcagcagctccccacacagatgcaggaggtggactctcttctgatgaagaggaggggaccagctctcaagcagaagcggccaggatactggctgcctcctggcctcaaaaccgagaagatgaagaaaagcagaagctgaagggtgggcccaagaagaccaaaagggaaaagaaagcagcagcttcccacctgttcccatttgagcagctgtga

SEQ ID NO: 173 - DNA, 1290 bp, Homo sapiens
atggcccaggctcctgctgacccgggcagagaaggccaccttgaacaaagaatcctgcaggtgctgacagaggctggctccccggtgaaacttgcccagctggtgaaggaatgccaagcacccaagagggagctcaaccaagtcctctaccgaatgaaaaaggagttgaaagtctccctcacatcccctgccacctggtgcttgggcgggactgatcctgaaggcgagggtcctgcagagctggccttgtccagccctgccgagaggccccagcaacatgcagctacaattccagagacccctggccctcagttcagccaacaacgggaggaagacatctacaggtttctcaaagacaatggtccccagagggccctggtcatcgcccaagcactgggaatgaggacagcaaaagatgtgaaccgagacttgtacaggatgaagagcaggcaccttctggacatggatgagcagtccaaagcatggacgatttaccgcccagaagattctggaagaagagcaaagtcagcctcaattatttaccagcacaatccaatcaacatgatctgccagaatggacccaacagctggatttccattgcaaactccgaagccatccagattggacacgggaacatcattacaagacagacagtctccagggaggacggttccgccggtccacgccacctcccttcaatggcaccaggtgattcctcaacttgggggaccctagttgatccctgggggccccaggacatccacatggagcagtccatactgagacgggtgcagctgggacacagcaatgagatgaggctccacggcgtcccgtccgagggccctgcccacatcccccctggcagccccccagtctctgccactgctgccggcccagaagcttcgtttgaagcaagaattcccagtccaggaactcaccctgagggggaagccgcccagagaatccacatgaaatcgtgctttctcgaggacgccaccatcggcaacagcaacaaaatgtctatcagcccaggggtggctggcccaggaggagtcgcagggtctggagagggggagccaggggaggacgcaggtcgtcgtcccgcagacacacaatccagaagtcactttcctcgagacattggtcagcccatcactcccagccactcgaagctcacccccaagctggaaactatgactcttggaaacaggagtcacaaagctgcagaaggcagccactatgtggatgaagcctcacacgaggggagctggtggggaggtgggatttag

SEQ ID NO: 174 - DNA, 2340 bp, Homo sapiens
atggcctcgttcgtgacagaagttttggcacactccgggaggctggaaaaggaggatctggggacccggatcagccgcctgacccggcgggtggaggagatcaagggtgaggtgtgcaatatgattagcaagaagtacagtgaattcctgcctagcatgcagagcgcgcagggcctgattacccaggtggataagctatctgaagacattgacctgctgaaatccaggatagagagtgaggtccgccgggatcttcacgtatcaaccggtgaatttacagacttaaagcagcagttggaaagagactcagttgtcctaagtttgcttaaacagttgcaggagttttccactgctattgaagaatataattgtgcattaacagagaagaagtatgtcactggtgctcagcgtctggaagaggcacagaaatgcttgaagttattaaaatccagaaaatgctttgatttaaaaatattgaaatctctcagcatggagctcacaatacagaaacagaacatactttatcaccttggagaagagtggcagaagctgattgtatggaagttcccaccatcaaaagataccagcagtttggaatcttacctacaaactgaacttcatttatacactgaacaatcgcacaaagaggagaagacccctatgccacccatcagttctgtcctcttggcattttctgttcttggagaactacacagcaagcttaaatcatttggtcagatgctgctgaagtatatccttaggccgctggcatcttgcccatcccttcatgctgtgatagaaagccagcctaacatagttattattcgttttgaatctataatgactaacttggaatatccatcaccatctgaagtttttacaaagatcagactggtactagaagtgctccagaaacagcttctagatttgccacttgacactgacctggaaaatgaaaaaacatctactgtcccattggctgagatgcttggagacatgatctgggaggacttgtctgagtgcctcatcaaaaactgtttggtttattcgattccaacaaatagcagcaaattacagcaatatgaagagatcatacagtccactgaagaatttgaaaatgccctaaaggaaatgagatttttaaaaggagatactacagatttgctgaaatacgctcgtaacatcaattctcattttgcaaacaaaaagtgccaggatgtgattgtggcagccagaaatctaatgacctcagaaattcataacactgtgaagattattcctgattctaagataaatgtgccagagttacccactcctgatgaggataacaaactggaagtacagaaagtatccaatactcagtaccacgaagtgatgaatttagagcctgaaaatacattggaccaacattccttttccttgcccacatgccgtatcagtgagtctgtgaagaaattaatggaactcgcctatcagactttactagaggcaacaaccagtagtgatcaatgtgctgttcaacttttctactcagtgaggaatatcttccatttgttccatgatgttgtaccaacatatcacaaggagaaccttcaaaaacttccccagttggctgctattcatcacaacaactgtatgtacattgctcaccacttgctgaccctcgggcatcagttcagattgcgtcttgcccccattctttgtgatggcactgctacttttgtggatcttgtacctggcttcaggagacttgggacagaatgctttttggcccaaatgcgggcacagaaaggtgaacttctggaaagattatcaagtgctaggaacttttcaaatatggacgatgaagagaattattctgcagcaagtaaagcagtccggcaggtactgcaccaactaaagagacttggaattgtgtggcaggatgtcctgccagtgaatatatattgcaaggctatggggactttactcaatacagcaatttctgaggtcattggcaaaattactgccctagaggacatatctactgaagatggtgataggttatattccttatgcaaaacagtgatggatgaaggaccccaagtatttgcacctttatctgaagaaagcaagaacaagaaatatcaagaagaggttccagtctatgtgccaaaatggatgccattcaaggaattgatgatgatgctacaagccagcttgcaagaaattggggatcggtgggcagatggaaaaggacccctggcagctgcgttctcttccagtgaagtaaaagctttaattcgtgccttgtttcagaacacagaaagaagagcagctgcccttgctaaaattaaatag

SEQ ID NO: 175 - protein, 427 aa, Homo sapiens
MAVLAALLRSGARSRSPLLRRLVQEIRYVERSYVSKPTLKEVVIVSATRTPIGSFLGSLSLLPATKLGSIAIQGAIEKAGIPKEEVKEAYMGNVLQGGEGQAPTRQAVLGAGLPISTPCTTINKVCASGMKAIMMASQSLMCGHQDVMVAGGMESMSNVPYVMNRGSTPYGGVKLEDLIVKDGLTDVYNKIHMGSCAENTAKKLNIARNEQDAYAINSYTRSKAAWEAGKFGNEVIPVTVTVKGQPDVVVKEDEEYKRVDFSKVPKLKTVFQKENGTVTAANASTLNDGAAALVLMTADAAKRLNVTPLARIVAFADAAVEPIDFPIAPVYAASMVLKDVGLKKEDIAMWEVNEAFSLVVLANIKMLEIDPQKVNINGGAVSLGHPIGMSGARIVGHLTHALKQGEYGLASICNGGGGASAMLIQKL

SEQ ID NO: 176 - protein, 698 aa, Homo sapiens
MQAHELFRYFRMPELVDFRQYVRTLPTNTLMGFGAFAALTTFWYATRPKPLKPPCDLSMQSVEVAGSGGARRSALLDSDEPLVYFYDDVTTLYEGFQRGIQVSNNGPCLGSRKPDQPYEWLSYKQVAELSECIGSALIQKGFKTAPDQFIGIFAQNRPEWVIIEQGCFAYSMVIVPLYDTLGNEAITYIVNKAELSLVFVDKPEKAKLLLEGVENKLIPGLKIIVVMDAYGSELVERGQRCGVEVTSMKAMEDLGRANRRKPKPPAPEDLAVICFTSGTTGNPKGAMVTHRNIVSDCSAFVKATENTVNPCPDDTLISFLPLAHMFERVVECVMLCHGAKIGFFQGDIRLLMDDLKVLQPTVFPVVPRLLNRMFDRIFGQANTTLKRWLLDFASKRKEAELRSGIIRNNSLWDRLIFHKVQSSLGGRVRLMVTGAAPVSATVLTFLRAALGCQFYEGYGQTECTAGCCLTMPGDWTAGHVGAPMPCNLIKLVDVEEMNYMAAEGEGEVCVKGPNVFQGYLKDPAKTAEALDKDGWLHTGDIGKWLPNGTLKIIDRKKHIFKLAQGEYIAPEKIENIYMRSEPVAQVFVHGESLQAFLIAIVVPDVETLCSWAQKRGFEGSFEELCRNKDVKKAILEDMVRLGKDSGLKPFEQVKGITLHPELFSIDNGLLTPTMKAKRPELRNYFRSQIDDLYSTIKV

SEQ ID NO: 177 - protein, 1144 aa, Homo sapiens
MPRNQGFSEPEYSAEYSAEYSVSLPSDPDRGVGRTHEISVRNSGSCLCLPRFMRLTFVPESLENLYQTYFKRQRHETLLVLVVFAALFDCYVVVMCAVVFSSDKLASLAVAGIGLVLDIILFVLCKKGLLPDRVTRRVLPYVLWLLITAQIFSYLGLNFARAHAASDTVGWQVFFVFSFFITLPLSLSPIVIISVVSCVVHTLVLGVTVAQQQQEELKGMQLLREILANVFLYLCAIAVGIMSYYMADRKHRKAFLEARQSLEVKMNLEEQSQQQENLMLSILPKHVADEMLKDMKKDESQKDQQQFNTMYMYRHENVSILFADIVGFTQLSSACSAQELVKLLNELFARFDKLAAKYHQLRIKILGDCYYCICGLPDYREDHAVCSILMGLAMVEAISYVREKTKTGVDMRVGVHTGTVLGGVLGQKRWQYDVWSTDVTVANKMEAGGIPGRVHISQSTMDCLKGEFDVEPGDGGSRCDYLEEKGIETYLIIASKPEVKKTATQNGLNGSALPNGAPASSKSSSPALIETKEPNGSAHSSGSTSEKPEEQDAQADNPSFPNPRRRLRLQDLADRVVDASEDEHELNQLLNEALLERESAQVVKKRNTFLLSMRFMDPEMETRYSVEKEKQSGAAFSCSCVVLLCTALVEILIDPWLMTNYVTFMVGEILLLILTICSLAAIFPRAFPKKLVAFSTWIDRTRWARNTWAMLAIFILVMANVVDMLSCLQYYTGPSNATAGMETEGSCLENPKYYNYVAVLSLIATIMLVQVSHMVKLTLMLLVAGAVATINLYAWRPVFDEYDHKRFREHDLPMVALEQMQGFNPGLNGTDRLPLVPSKYSMTVMVFLMMLSFYYFSRHVEKLARTLFLWKIEVHDQKERVYEMRRWNEALVTNMLPEHVARHFLGSKKRDEELYSQTYDEIGVMFASLPNFADFYTEESINNGGIECLRFLNEIISDFDSLLDNPKFRVITKIKTIGSTYMAASGVTPDVNTNGFASSNKEDKSERERWQHLADLADFALAMKDTLTNINNQSFNNFMLRIGMNKGGVLAGVIGARKPHYDIWGNTVNVASRMESTGVMGNIQVVEETQVILREYGFRFVRRGPIFVKGKGELLTFFLKGRDKLATFPNGPSVTLPHQVVDNS

SEQ ID NO: 178 - protein, 1080 aa, Homo sapiens
MPAKGRYFLNEGEEGPDQDALYEKYQLTSQHGPLLLTLLLVAATACVALIIIAFSQGDPSRHQAILGMAFLVLAVFAALSVLMYVECLLRRWLRALALLTWACLVALGYVLVFDAWTKAACAWEQVPFFLFIVFVVYTLLPFSMRGAVAVGAVSTASHLLVLGSLMGGFTTPSVRVGLQLLANAVIFLCGNLTGAFHKHQMQDASRDLFTYTVKCIQIRRKLRIEKRQQENLLLSVLPAHISMGMKLAIIERLKEHGDRRCMPDNNFHSLYVKRHQNVSILYADIVGFTQLASDCSPKELVVVLNELFGKFDQIAKANECMRIKILGDCYYCVSGLPVSLPTHARNCVKMGLDMCQAIKQVREATGVDINMRVGIHSGNVLCGVIGLRKWQYDVWSHDVSLANRMEAAGVPGRVHITEATLKHLDKAYEVEDGHGQQRDPYLKEMNIRTYLVIDPRSQQPPPPSQHLPRPKGDAALKMRASVRMTRYLESWGAARPFAHLNHRESVSSGETHVPNGRRPKSVPQRHRRTPDRSMSPKGRSEDDSYDDEMLSAIEGLSSTRPCCSKSDDFYTFGSIFLEKGFEREYRLAPIPRARHDFACASLIFVCILLVHVLLMPRTAALGVSFGLVACVLGLVLGLCFATKFSRCCPARGTLCTISERVETQPLLRLTLAVLTIGSLLTVAIINLPLMPFQVPELPVGNETGLLAASSKTRALCEPLPYYTCSCVLGFIACSVFLRMSLEPKVVLLTVALVAYLVLFNLSPCWQWDCCGQGLGNLTKPNGTTSGTPSCSWKDLKTMTNFYLVLFYITLLTLSRQIDYYCRLDCLWKKKFKKEHEEFETMENVNRLLLENVLPAHVAAHFIGDKLNEDWYHQSYDCVCVMFASVPDFKVFYTECDVNKEGLECLRLLNEIIADFDELLLKPKFSGVEKIKTIGSTYMAAAGLSVASGHENQELERQHAHIGVMVEFSIALMSKLDGINRHSFNSFRLRVGINHGPVIAGVIGARKPQYDIWGNTVNVASRMESTGELGKIQVTEETCTILQGLGYSCECRGLINVKGKGELRTYFVCTDTAKFQGLGLN

SEQ ID NO: 179 - protein, 413 aa, Homo sapiens [sequence omitted]

SEQ ID NO: 180 - protein, 484 aa, Homo sapiens
MAAGGDHGSPDSYRSPLASRYASPEMCFVFSDRYKFRTWRQLWLWLAEAEQTLGLPITDEQIQEMKSNLENIDFKMAAEEEKRLRHDVMAHVHTFGHCCPKAAGIIHLGATSCYVGDNTDLIILRNALDLLLPKLARVISRLADFAKERASLPTLGFTHFQPAQLTTVGKRCCLWIQDLCMDLQNLKRVRDDLRFRGVKGTTGTQASFLQLFEGDDHKVEQLDKMVTEKAGFKRAFIITGQTYTRKVDIEVLSVLASLGASVHKICTDIRLLANLKEMEEPFEKQQIGSSAMPYKRNPMRSERCCSLARHLMTLVMDPLQTASVQWFERTLDDSANRRICLAEAFLTADTILNTLQNISEGLVVYPKVIERRIRQELPFMATENIIMAMVKAGGSRQDCHEKIRVLSQQAASVVKQEGGDNDLIERIQVDAYFSPIHSQLDHLLDPSSFTGRASQQVQRFLEEEVYPLLKPYESVMKVKAELCL

SEQ ID NO: 181 - protein, 1901 aa, Homo sapiens
MATFRNNHMKTKASVRKSFSEDVFQSVKSLLQSQKELCSVTAEDCLQQDEHANLTEVTFLGFNEETDAAHIQDLAAVSLELPDILNSLHFCSLNENEIICMKNINKPLDISSDPLNQSHPSGMLCVMRVSPTSPRLRIDFIFSLLSKYATGIRYTLDTFLHQKHQLETTDEDDDDTNQSVSSIEDDFVTAFEHLEEEETSKPYNDGMNITVLRSQCDAASQTVTGHHLETHDLKILISSGQQKSLAKPSTSSVNVLGHKELPSVKTSVTTSISEPWTQRSFYRSSNASDKDSDLQKTFFSSSPAYSSESECSSPSPVIFLDEEGYQKSLKAKLELPKIPVMKDDIEDSDSEVSEFFDSFDQFDELEQTLETCLFNKDPVIGKSSQRKGHKHGKSCMNPQKFKFDRPALPANVRKPTPRKPESPYGNLCDAPDSPRPVKASREDSGLFSPIRSSAFSPLGGCTPAECFCQTDIGGDRIHENHDSVYYTYEDYAKSISCEVLGSVLRTHHTNTLSNINSIKHGENKTVTFKHGNLDQKNKSKNKSLMIKDSIQKFAADLVEKSFGSAFKDLQKGVSSCTNALYHLAIKLTSSVLQMAFDELRRQRAFSLKERAISGLANFLVSEALSNALKDLQYVKKQIFTNTVARFAADLAEELVFEGIMEVCQFSYPQTPASPQCGSFDFEDKVVKLYAKDLSESVIQEAFIELSQVDVTFTTKAAVSVSTDNIKYVSAESVVPSTQAVTFSPSFHNQAIMVTKPVQEYKKEYTVQQALFCTSGIVTSIPVPLAGSALLPYHISSTACQAKAHLSSDDSNSNGDSAQVHIATKNREEKAACLRNICLPSEHNPGNQNDFKPTNDDIEMQSSSKLPNDPAIISNFSAAVVHTIVNETLESMTSLEVTKMVDERTDYLTKSLKEKTPPFSHCDQAVLQCSEASSNKDMFADRLSKSIIKHSIDKSKSVIPNIDKNAVYKESLPVSGEESQLTPEKSPKFPDSQNQLTHCSLSAAKDCVPECKVSMVHGSSLETLPSCPAVTGQKSDLKESAKDQPLKKHNLNSTSLEALSFGQENPFPHSHTFSSTALTCVDGLHVEDKQKVRDRNVIPDTPPSTPLVPSRASSEWDIKKLTKKLKGELAKEFAPATPPSTPHNSSVGSLSENEQNTIEKEEFMLKLMRSLSEEVESSESGELPEVDVKSEHSGKKVQFAEALATHILSLATEMAASHLDNKIIQEPKVKNPCLNVQSQRSVSPTFLNPSDENLKTLCNFAGDLAAEVITEAEKIAKVRNCMLFKQKKNSCYADGDEDYKVEEKLDIEAVVHPREVDPFILSLPPSSCMSGLMYKYPSCESVTDEYAGHLIQILKQEGGNSELIMDQYANRLAYRSVKSGLQEAAKTTKVQCNSRMFPVPSSQVKTNKELLMFSNKEHHQEADKKRQSKRNEGYFCKNQTCERTLDPYRNEVSQLYSFSTSLVHSITKDAKEELTASLVGLPKSLTDSCLFEKSGYEEDNECHVTPELPKSLQPSSQNHRFYHSTGSLNGYGCGDNVVQAVEQYAKKVVDDTLELTLGSTVFRVSETTKSADRVTYAEKLSPLTGQACRYCDLKELHNCTGNSSQHFFRQGSLASSKPASNPKFSSRYQKSRIFHLSVPQIHVNLDKKAVLAEKIVAEAIEKAERELSSTSLAADSGIGQEGASFAESLATETMTAAVTNVGHAVSSSKEIEDFQSTESVSSQQMNLSIGDDSTGSWSNLSFEDEHQDESSSFHHLSESNGNSSSWSSLGLEGDLYEDNLSFPTSDSDGPDDKDEEHEDEVEGLGQDGKTLLITNIDMEPCTVDPQLRIILQWLIASEAEVAELYFHDSANKEFMLLSKQLQEKGWKVGDLLQAVLQYYEVMEKASSEERCKSLFDWLLENA

SEQ ID NO: 182 - protein, 364 aa, Homo sapiens
MPHSYPALSAEQKKELSDIALRIVAPGKGILAADESVGSMAKRLSQIGVENTEENRRLYRQVLFSADDRVKKCIGGVIFFHETLYQKDDNGVPFVRTIQDKGIVVGIKVDKGVVPLAGTDGETTTQGLDGLSERCAQYKKDGADFAKWRCVLKISERTPSALAILENANVLARYASICQQNGIVPIVEPEILPDGDHDLKRCQYVTEKVLAAVYKALSDHHVYLEGTLLKPNMVTPGHACPIKYTPEEIAMATVTALRRTVPPAVPGVTFLSGGQSEEEASFNLNAINRCPLPRPWALTFSYGRALQASALNAWRGQRDNAGAATEEFIKRAEVNGLAAQGKYEGSGEDGGAAAQSLYIANHAY

SEQ ID NO: 183 - protein, 1015 aa, Homo sapiens
MTVSQKGGPQPTPSPAGPGTQLGPITGEMDEADSAFLKFKQTADDSLSLTSPNTESIFVEDPYTASLRSEIESDGHEFEAESWSLAVDAAYAKKQKREVVKRQDVLYELMQTEVHHVRTLKIMLKVYSRALQEELQFSSKAIGRLFPCADDLLETHSHFLARLKERRQESLEEGSDRNYVIQKIGDLLVQQFSGENGERMKEKYGVFCSGHNEAVSHYKLLLQQNKKFQNLIKKIGNFSIVRRLGVQECILLVTQRITKYPVLVERIIQNTEAGTEDYEDLTQALNLIKDIISQVDAKVSECEKGQRLREIAGKMDLKSSSKLKNGLTFRKEDMLQRQLHLEGMLCWKTTSGRLKDILAILLTDVLLLLQEKDQKYVFASVDSKPPVISLQKLIVREVANEEKAMFLISASLQGPEMYEIYTSSKEDRNAWMAHIQRAVESCPDEEEGPFSLPEEERKVVEARATRLRDFQERLSMKDQLIAQSLLEKQQIYLEMAEMGGLEDLPQPRGLFRGGDPSETLQGELILKSAMSEIEGIQSLICRQLGSANGQAEDGGSSTGPPRRAETFAGYDCTNSPTKNGSFKKKVSSTDPRPRDWRGPPNSPDLKLSDSDIPGSSEESPQVVEAPGTESDPRLPTVLESELVQRIQTLSQLLLNLQAVIAHQDSYVETQRAAIQEREKQFRLQSTRGNLLLEQERQRNFEKQREERAALEKLQSQLRHEQQRWERERQWQHQELERAGARLQEREGEARQLRERLEQERAELERQRQAYQHDLERLREAQRAVERERERLELLRRLKKQNTAPGALPPDTLAEAQPPSHPPSFNGEGLEGPRVSMLPSGVGPEYAERPEVARRDSAPTENRLAKSDVPIQLLSATNQFQRQAAVQQQIPTKLAASTKGGKDKGGKSRGSQRWESSASFDLKQQLLLNKLMGKDESTSRNRRSLSPILPGRHSPAPPPDPGFPAPSPPPADSPSEGFSLKAGGTALLPGPPAPSPLPATPLSAKEDASKEDVIFF

SEQ ID NO: 184 - protein, 625 aa, Homo sapiens
MADQRMDISSTISDFMSPGPTDLLSSSLGTSGVDCNRKRKGSSTDYQESMDTDKDDPHGRLEYTEHQGRIKNAREAHSQIEKRRRDKMNSFIDELASLVPTCNAMSRKLDKLTVLRMAVQHMKTLRGATNPYTEANYKPTFLSDDELKHLILRAADGFLFVVGCDRGKILFVSESVFKILNYSQNDLIGQSLFDYLHPKDIAKVKEQLSSSDTAPRERLIDAKTGLPVKTDITPGPSRLCSGARRSFFCRMKCNRPSVKVEDKDFPSTCSKKKDRKSFCTIHSTGYLKSWPPTKMGLDEDNEPDNEGCNLSCLVAIGRLHSHVVPQPVNGEIRVKSMEYVSRHAIDGKFVFVDQRATAILAYLPQELLGTSCYEYFHQDDIGHLAECHRQVLQTREKITTNCYKFKIKDGSFITLRSRWFSFMNPWTKEVEYIVSTNTVVLANVLEGGDPTFPQLTASPHSMDSMLPSGEGGPKRTHPTVPGIPGGTRAGAGKIGRMIAEEIMEIHRIRGSSPSSCGSSPLNITSTPPPDASSPGGKKILNGGTPDIPSSGLLSGQAQENPGYPYSDSSSILGENPHIGIDMIDNDQGSSSPSNDEAAMAVIMSLLEADAGLGGPVDFSDLPWPL

SEQ ID NO: 185 - protein, 533 aa, Homo sapiens
MGPRGAASLPRGPGPRRLLLPVVLPLLLLLLLAPPGSGAGASRPPHLVFLLADDLGWNDVGFHGSRIRTPHLDALAAGGVLLDNYYTQPLCTPSRSQLLTGRYQIRTGLQHQIIWPCQPSCVPLDEKLLPQLLKEAGYTTHMVGKWHLGMYRKECLPTRRGFDTYFGYLLGSEDYYSHERCTLIDALNVTRCALDFRDGEEVATGYKNMYSTNIFTKRAIALITNHPPEKPLFLYLALQSVHEPLQVPEEYLKPYDFIQDKNRHHYAGMVSLMDEAVGNVTAALKSSGLWNNTVFIFSTDNGGQTLAGGNNWPLRGRKWSLWEGGVRGVGFVASPLLKQKGVKNRELIHISDWLPTLVKLARGHTNGTKPLDGFDVWKTISEGSPSPRIELLHNIDPNFVDSSPCPRNSMAPAKDDSSLPEYSAFNTSVHAAIRHGNWKLLTGYPGCGYWFPPPSQYNVSEIPSSDPPTKTLWLFDIDRDPEERHDLSREYPHIVTKLLSRLQFYHKHSVPVYFPAQDPRCDPKATGVWGPWM

SEQ ID NO: 186 - protein, 1205 aa, Homo sapiens
MTNPSDRVLPANSMAESREGDFGCTVMELRKLMELRSRDALTQINVHYGGVQNLCSRLKTSPVEGLSGNPADLEKRRQVFGHNVIPPKKPKTFLELVWEALQDVTLIILEIAAIISLVLSFYRPAGEENELCGQVATTPEDENEAQAGWIEGAAILFSVIIVVLVTAFNDWSKEKQFRGLQCRIEQEQKFSIIRNGQLIQLPVAEIVVGDIAQVKYGDLLPADGILIQGNDLKIDESSLTGESDHVKKSLDKDPMLLSGTHVMEGSGRMVVTAVGVNSQTGIILTLLGVNEDDEGEKKKKGKKQGVPENRNKAKTQDGVALEIQPLNSQEGIDNEEKDKKAVKVPKKEKSVLQGKLTRLAVQIGKAGLLMSALTVFILILYFVIDNFVINRRPWLPECTPIYIQYFVKFFIIGITVLVVAVPEGLPLAVTISLAYSVKKMMKDNNLVRHLDACETMGNATAICSDKTGTLTMNRMTVVQAYIGGIHYRQIPSPDVFLPKVLDLIVNGISINSAYTSKILPPEKEGGLPRQVGNKTECALLGFVTDLKQDYQAVRNEVPEEKLYKVYTFNSVRKSMSTVIRNPNGGFRMYSKGASEIILRKCNRILDRKGEAVPFKNKDRDDMVRTVIEPMACDGLRTICIAYRDFDDTEPSWDNENEILTELTCIAVVGIEDPVRPEVPDAIAKCKQAGITVRMVTGDNINTARAIATKCGILTPGDDFLCLEGKEFNRLIRNEKGEVEQEKLDKIWPKLRVLARSSPTDKHTLVKGIIDSTVGEHRQVVAVTGDGTNDGPALKKADVGFAMGIAGTDVAKEASDIILTDDNFTSIVKAVMWGRNVYDSISKFLQFQLTVNVVAVIVAFTGACITQDSPLKAVQMLWVNLIMDTFASLALATEPPTESLLKRRPYGRNKPLISRTMMKNILGHAFYQLIVIFILVFAGEKFFDIDSGRKAPLHSPPSQHYTIVFNTFVLMQLFNEINSRKIHGEKNVFSGIYRNIIFCSVVLGTFICQIFIVEFGGKPFSCTSLSLSQWLWCLFIGIGELLWGQFISAIPTRSLKFLKEAGHGTTKEEITKDAEGLDEIDHAEMELRRGQILWFRGLNRIQTQIKVVKAFHSSLHESIQKPYNQKSIHSFMTHPEFAIEEELPRTPLLDEEEEENPDKASKFGTRVLLLDGEVTPYANTNNNAVDCNQVQLPQSDSSLQSLETSV

SEQ ID NO: 187 - protein, 841 aa, Homo sapiens
MSVDEKPDSPMYVYESTVHCTNILLGLNDQRKKDILCDVTLIVERKEFRAHRAVLAACSEYFWQALVGQTKNDLVVSLPEEVTARGFGPLLQFAYTAKLLLSRENIREVIRCAEFLRMHNLEDSCFSFLQTQLLNSEDGLFVCRKDAACQRPHEDCENSAGEEEDEEEETMDSETAKMACPRDQMLPEPISFEAAAIPVAEKEEALLPEPDVPTDTKESSEKDALTQYPRYKKYQLACTKNVYNASSHSTSGFASTFREDNSSNSLKPGLARGQIKSEPPSEENEEESITLCLSGDEPDAKDRAGDVEMDRKQPSPAPTPTAPAGAACLERSRSVASPSCLRSLFSITKSVELSGLPSTSQQHFARSPACPFDKGITQGDLKTDYTPFTGNYGQPHVGQKEVSNFTMGSPLRGPGLEALCKQEGELDRRSVIFSSSACDQVSTSVHSYSGVSSLDKDLSEPVPKGLWVGAGQSLPSSQAYSHGGLMADHLPGRMRPNTSCPVPIKVCPRSPPLETRTRTSSSCSSYSYAEDGSGGSPCSLPLCEFSSSPCSQGARFLATEHQEPGLMGDGMYNQVRPQIKCEQSYGTNSSDESGSFSEADSESCPVQDRGQEVKLPFPVDQITDLPRNDFQMMIKMHKLTSEQLEFIHDVRRRSKNRIAAQRCRKRKLDCIQNLECEIRKLVCEKEKLLSERNQLKACMGELLDNFSCLSQEVCRDIQSPEQIQALHRYCPVLRPMDLPTASSINPAPLGAEQNIAASQCAVGENVPCCLEPGAAPPGPPWAPSNTSENCTSGRRLEGTDPGTFSERGPPLEPRSQTVTVDFCQEMTDKCTTDEQPRKDYT

SEQ ID NO: 188 - protein, 773 aa, Homo sapiens
MSRRKQGKPQHLSKREFSPEPLEAILTDDEPDHGPLGAPEGDHDLLTCGQCQMNFPLGDILIFIEHKRKQCNGSLCLEKAVDKPPSPSPIEMKKASNPVEVGIQVTPEDDDCLSTSSRGICPKQEHIADKLLHWRGLSSPRSAHGALIPTPGMSAEYAPQGICKDEPSSYTCTTCKQPFTSAWFLLQHAQNTHGLRIYLESEHGSPLTPRVGIPSGLGAECPSQPPLHGIHIADNNPFNLLRIPGSVSREASGLAEGRFPPTPPLFSPPPRHHLDPHRIERLGAEEMALATHHPSAFDRVLRLNPMAMEPPAMDFSRRLRELAGNTSSPPLSPGRPSPMQRLLQPFQPGSKPPFLATPPLPPLQSAPPPSQPPVKSKSCEFCGKTFKFQSNLVVHRRSHTGEKPYKCNLCDHACTQASKLKRHMKTHMHKSSPMTVKSDDGLSTASSPEPGTSDLVGSASSALKSVVAKFKSENDPNLIPENGDEEEEEDDEEEEEEEEEEEEELTESERVDYGFGLSLEAARHHENSSRGAVVGVGDESRALPDVMQGMVLSSMQHFSEAFHQVLGEKHKRGHLAEAEGHRDTCDEDSVAGESDRIDDGTVNGRGCSPGESASGGLSKKLLLGSPSSLSPFSKRIKLEKEFDLPPAAMPNTENVYSQWLAGYAASRQLKDPFLSFGDSRQSPFASSSEHSSENGSLRFSTPPGELDGGISGRSGTGSGGSTPHISGPGPGRPSSKEGRRSDTCSSHTPIRRSTQRAQDVWQFSDGSSRALKF

SEQ ID NO: 189 - protein, 259 aa, Homo sapiens
MGDAAADPPGPALPCEFLRPGCGAPLSPGAQLGRGAPTSAFPPPAAEAHPAARRGLRSPQLPSGAMSQNGAPGMQEESLQGSWVELHFSNNGNGGSVPASVSIYNGDMEKILLDAQHESGRSSSKSSHCDSPPRSQTPQDTNRASETDTHSIGEKNSSQSEEDDIERRKEVESILKKNSDWIWDWSSRPENIPPKEFLFKHPKRTATLSMRNTSVMKKGGIFSAEFLKVFLPSLLLSHLLAIGLGIYIGRRLTTSTSTF

SEQ ID NO: 190 - protein, 171 aa, Homo sapiens
MHPFYTRAATMIGEIAAAVSFISKFLRTKGLTSERQLQTFSQSLQELLAEHYKHHWFPEKPCKGSGYRCIRINHKMDPLIGQAAQRIGLSSQELFRLLPSELTLWVDPYEVSYRIGEDGSICVLYEASPAGGSTQNSTNVQMVDSRISCKEELLLGRTSPSKNYNMMTVSG

SEQ ID NO: 191 - protein, 252 aa, Homo sapiens
MKNEIAAVVFFFTRLVRKHDKLKKEAVERFAEKLTLILQEKYKNHWYPEKPSKGQAYRCIRVNKFQRVDPDVLKACENSCILYSDLGLPKELTLWVDPCEVCCRYGEKNNAFIVASFENKDENKDEISRKVTRALDKVTSDYHSGSSSSDEETSKEMEVKPSSVTAAASPVYQISELIFPPLPMWHPLPRKKPGMYRGNGHQNHYPPPVPFGYPNQGRKNKPYRPIPVTWVPPPGMHCDRNHWINPHMLAPH

SEQ ID NO: 192 - protein, 253 aa, Homo sapiens
MMMKIPWGSIPVLMLLLLLGLIDISQAQLSCTGPPAIPGIPGIPGTPGPDGQPGTPGIKGEKGLPGLAGDHGEFGEKGDPGIPGNPGKVGPKGPMGPKGGPGAPGAPGPKGESGDYKATQKIAFSATRTINVPLRRDQTIRFDHVITNMNNNYEPRSGKFTCKVPGLYYFTYHASSRGNLCVNLMRGRERAQKVVTFCDYAYNTFQVTTGGMVLKLEQGENVFLQATDKNSLLGMEGANSIFSGFLLFPDMEA

SEQ ID NO: 193 - protein, 75 aa, Homo sapiens
MERSFVWLSCLDSDSCNLTFRLGEVESHACSPSLLWNLLTQYLPPGAGHILRTYNFPVLSCVSSCHLIGGKMPEN

SEQ ID NO: 194 - protein, 357 aa, Homo sapiens
MARENGESSSSWKKQAEDIKKIFEFKETLGTGAFSEVVLAEEKATGKLFAVKCIPKKALKGKESSIENEIAVLRKIKHENIVALEDIYESPNHLYLVMQLVSGGELFDRIVEKGFYTEKDASTLIRQVLDAVYYLHRMGIVHRDLKPENLLYYSQDEESKIMISDFGLSKMEGKGDVMSTACGTPGYVAPEVLAQKPYSKAVDCWSIGVIAYILLCGYPPFYDENDSKLFEQILKAEYEFDSPYWDDISDSAKDFIRNLMEKDPNKRYTCEQAARHPWIAGDTALNKNIHESVSAQIRKNFAKSKWRQAFNATAVVRHMRKLHLGSSLDSSNASVSSSLSLASQKDCAYVAKPESLS

SEQ ID NO: 195 - protein, 377 aa, Homo sapiens
MAEGNHRKKPLKVLESLGKDFLTGVLDNLVEQNVLNWKEEEKKKYYDAKTEDKVRVMADSMQEKQRMAGQMLLQTFFNIDQISPNKKAHPNMEAGPPESGESTDALKLCPHEEFLRLCKERAEEIYPIKERNNRTRLALIICNTEFDHLPPRNGADFDITGMKELLEGLDYSVDVEENLTARDMESALRAFATRPEHKSSDSTFLVLMSHGILEGICGTVHDEKKPDVLLYDTIFQIFNNRNCLSLKDKPKVIIVQACRGANRGELWVRDSPASLEVASSQSSENLEEDAVYKTHVEKDFIAFCSSTPHNVSWRDSTMGSIFITQLITCFQKYSWCCHLEEVFRKVQQSFETPRAKAQMPTIERLSMTRYFYLFPGN

SEQ ID NO: 196 - protein, 1166 aa, Homo sapiens
MDLGTAEGTRCTDPPAGKPAMAPKRKGGLKLNAICAKLSRQVVVEKRADAGSHTEGSPSQPRDQERSGPESGAARAPRSEEDKRRAVIEKWVNGEYSEEPAPTPVLGRIAREGLELPPEGVYMVQPQGCSDEEDHAEEPSKDGGALEEKDSDGAASKEDSGPSTRQASGEASSLRDYAASTMTEFLGMFGYDDQNTRDELARKISFEKLHAGSTPEAATSSMLPTSEDTLSKRARFSKYEEYIRKLKAGEQLSWPAPSTKTEERVGKEVVGTLPGLRLPSSTAHLETKATILPLPSHSSVQMQNLVARASKYDFFIQKLKTGENLRPQNGSTYKKPSKYDLENVKYLHLFKPGEGSPDMGGAIAFKTGKVGRPSKYDVRGIQKPGPAKVPPTPSLAPAPLASVPSAPSAPGPGPEPPASLSFNTPEYLKSTFSKTDSITTGTVSTVKNGLPTDKPAVTEDVNIYQKYIARFSGSQHCGHIHCAYQYREHYHCLDPECNYQRFTSKQDVIRHYNMHKKRDNSLQHGFMRFSPLDDCSVYYHGCHLNGKSTHYHCMQVGCNKVYTSTSDVMTHENFHKKNTQLINDGFQRFRATEDCGTADCQFYGQKTTHFHCRRPGCTFTFKNKCDIEKHKSYHIKDDAYAKDGFKKFYKYEECKYEGCVYSKATNHFHCIRAGCGFTFTSTSQMTSHKRKHERRHIRSSGALGLPPSLLGAKDTEHEESSNDDLVDFSALSSKNSSLSASPTSQQSSASLAAATAATEAGPSATKPPNSKISGLLPQGLPGSIPLALALSNSGLPTPTPYFPILAGRGSTSLPVGTPSLLGAVSSGSAASATPDTPTLVASGAGDSAPVAAASVPAPPASIMERISASKGLISPMMARLAAAALKPSATFDPGSGQQVTPARFPPAQVKPEPGESTGAPGPHEASQDRSLDLTVKEPSNESNGHAVPANSSLLSSLMNKMSQGNPGLGSLLNIKAEAEGSPAAEPSPFLGKAVKALVQEKLAEPWKVYLRRFGTKDFCDGQCDFLHKAHFHCVVEECGALFSTLDGAIKHANFHFRTEGGAAKGNTEAAFPASAAETKPPMAPSSPPVPPVTTATVSSLEGPAPSPASVPSTPTLLAWKQLASTIPQMPQIPASVPHLPASPLATTSLENAKPQVKPGFLQFQEK

SEQ ID NO: 197 - protein, 91 aa, Homo sapiens
MKVSAAALAVILIATALCAPASASPYSSDTTPCCFAYIARPLPRAHIKEYFYTSGKCSNPAVVFVTRKNRQVCANPEKKWVREYINSLEMS

SEQ ID NO: 198 - protein, 378 aa, Homo sapiens
MDLGKPMKSVLVVALLVIFQVCLCQDEVTDDYIGDNTTVDYTLFESLCSKKDVRNFKAWFLPIMYSIICFVGLLGNGLVVLTYIYFKRLKTMTDTYLLNLAVADILFLLTLPFWAYSAAKSWVFGVHFCKLIFAIYKMSFFSGMLLLLCISIDRYVAIVQAVSAHRHRARVLLISKLSCVGIWILATVLSIPELLYSDLQRSSSEQAMRCSLITEHVEAFITIQVAQMVIGFLVPLLAMSFCYLVIIRTLLQARNFERNKAIKVIIAVVVVFIVFQLPYNGVVLAQTVANFNITSSTCELSKQLNIAYDVTYSLACVRCCVNPFLYAFIGVKFRNDLFKLFKDLGCLSQEQLRQWSSCRHIRRSSMSVEAETTTTFSP

SEQ ID NO: 199 - protein, 299 aa, Homo sapiens
MWLPWALLLLWVPGCFALSKCRTVAGPVGGSLSVQCPYEKEHRTLNKYWCRPPQIFLCDKIVETKGSAGKRNGRVSIRDSPANLSFTVTLENLTEEDAGTYWCGVDTPWLRDFHDPVVEVEVSVFPASTSMTPASITAAKTSTITTAFPPVSSTTLFAVGATHSASIQEETEEVVNSQLPLLLSLLALLLLLLVGASLLAWRMFQKWIKAGDHSELSQNPKQAATQSELHYANLELLMWPLQEKPAPPREVEVEYSTVASPREELHYASVVFDSNTNRIAAQRPREEEPDSDYSVIRKT

SEQ ID NO: 200 - protein, 281 aa, Homo sapiens
MSAQESCLSLIKYFLFVFNLFFFVLGSLIFCFGIWILIDKTSFVSFVGLAFVPLQIWSKVLAISGIFTMGIALLGCVGALKELRCLLGLYFGMLLLLFATQITLGILISTQRAQLERSLRDVVEKTIQKYGTNPEETAAEESWDYVQFQLRCCGWHYPQDWFQVLILRGNGSEAHRVPCSCYNLSATNDSTILDKVILPQLSRLGHLARSRHSADICAVPAESHIYREGCAQGLQKWLHNNLISIVGICLGVGLLELGFMTLSIFLCRNLDHVYNRLARYR

SEQ ID NO: 201 - protein, 226 aa, Homo sapiens
MPGGPGVLQALPATIFLLFLLSAVYLGPGCQALWMHKVPASLMVSLGEDAHFQCPHNSSNNANVTWWRVLHGNYTWPPEFLGPGEDPNGTLIIQNVNKSHGGIYVCRVQEGNESYQQSCGTYLRVRQPPPRPFLDMGEGTKNRIITAEGIILLFCAVVPGTLLLFRKRWQNEKLGLDAGDEYEDENLYEGLNLDDCSMYEDISRGLQGTYQDVGSLNIGDVQLEKP

SEQ ID NO: 202 - protein, 229 aa, Homo sapiens
MARLALSPVPSHWMVALLLLLSAEPVPAARSEDRYRNPKGSACSRIWQSPRFIARKRGFTVKMHCYMNSASGNVSWLWKQEMDENPQQLKLEKGRMEESQNESLATLTIQGIRFEDNGIYFCQQKCNNTSEVYQGCGTELRVMGFSTLAQLKQRNTLKDGIIMIQTLLIILFIIVPIFLLLDKDDSKAGMEEDHTYEGLDIDQTATYEDIVTLRTGEVKWSVGEHPGQE

SEQ ID NO: 203 - protein, 235 aa, Homo sapiens
MALPVTALLLPLALLLHAARPSQFRVSPLDRTWNLGETVELKCQVLLSNPTSGCSWLFQPRGAAASPTFLLYLSQNKPKAAEGLDTQRFSGKRLGDTFVLTLSDFRRENEGYYFCSALSNSIMYFSHFVPVFLPAKPTTTPAPRPPTPAPTIASQPLSLRPEACRPAAGGAVHTRGLDFACDIYIWAPLAGTCGVLLLSLVITLYCNHRNRRRVCKCPRPVVKSGDKPSLSARYV

SEQ ID NO: 204 - protein, 652 aa, Homo sapiens
MATSMGLLLLLLLLLTQPGAGTGADTEAVVCVGTACYTAHSGKLSAAEAQNHCNQNGGNLATVKSKEEAQHVQRVLAQLLRREAALTARMSKFWIGLQREKGKCLDPSLPLKGFSWVGGGEDTPYSNWHKELRNSCISKRCVSLLLDLSQPLLPSRLPKWSEGPCGSPGSPGSNIEGFVCKFSFKGMCRPLALGGPGQVTYTTPFQTTSSSLEAVPFASAANVACGEGDKDETQSHYFLCKEKAPDVFDWGSSGPLCVSPKYGCNFNNGGCHQDCFEGGDGSFLCGCRPGFRLLDDLVTCASRNPCSSSPCRGGATCVLGPHGKNYTCRCPQGYQLDSSQLDCVDVDECQDSPCAQECVNTPGGFRCECWVGYEPGGPGEGACQDVDECALGRSPCAQGCTNTDGSFHCSCEEGYVLAGEDGTQCQDVDECVGPGGPLCDSLCFNTQGSFHCGCLPGWVLAPNGVSCTMGPVSLGPPSGPPDEEDKGEKEGSTVPRAATASPTRGPEGTPKATPTTSRPSLSSDAPITSAPLKMLAPSGSPGVWREPSIHHATAASGPQEPAGGDSSVATQNNDGTDGQKLLLFYILGTVVAILLLLALALGLLVYRKRRAKREEKKEKKPQNAADSYSWVPERAESRAMENQYSPTPGTDC

SEQ ID NO: 205 - protein, 414 aa, Homo sapiens
MTKARLFRLWLVLGSVFMILLIIVYWDSAGAAHFYLHTSFSRPHTGPPLPTPGPDRDRELTADSDVDEFLDKFLSAGVKQSDLPRKETEQPPAPGSMEESVRGYDWSPRDARRSPDQGRQQAERRSVLRGFCANSSLAFPTKERAFDDIPNSELSHLIVDDRHGAIYCYVPKVACTNWKRVMIVLSGSLLHRGAPYRDPLRIPREHVHNASAHLTFNKFWRRYGKLSRHLMKVKLKKYTKFLFVRDPFVRLISAFRSKFELENEEFYRKFAVPMLRLYANHTSLPASAREAFRAGLKVSFANFIQYLLDPHTEKLAPFNEHWRQVYRLCHPCQIDYDFVGKLETLDEDAAQLLQLLQVDRQLRFPPSYRNRTASSWEEDWFAKIPLAWRQQLYKLYEADFVLFGYPKPENLLRD

SEQ ID NO: 206 - protein, 1497 aa, Homo sapiens
MDVTKKNKRDGTEVTERIVTETVTTRLTSLPPKGGTSNGYAKTASLGGGSRLEKQSLTHGSSGYINSTGSTRGHASTSSYRRAHSPASTLPNSPGSTFERKTHVTRHAYEGSSSGNSSPEYPRKEFASSSTRGRSQTRESEIRVRLQSASPSTRWTELDDVKRLLKGSRSASVSPTRNSSNTLPIPKKGTVETKIVTASSQSVSGTYDATILDANLPSHVWSSTLPAGSSMGTYHNNMTTQSSSLLNTNAYSAGSVFGVPNNMASCSPTLHPGLSTSSSVFGMQNNLAPSLTTLSHGTTTTSTAYGVKKNMPQSPAAVNTGVSTSAACTTSVQSDDLLHKDCKFLILEKDNTPAKKEMELLIMTKDSGKVFTASPASIAATSFSEDTLKKEKQAAYNADSGLKAEANGDLKTVSTKGKTTTADIHSYGSSGGGGSGGGGGVGGAGGGPWGPAPAWCPCGSCCSWWKWLLGLLLTWLLLLGLLFGLIALAEEVRKLKARVDELERIRRSILPYGDSMDRIEKDRLQGMAPAAGADLDKIGLHSDSQEELWMFVRKKLMMEQENGNLRGSPGPKGDMGSPGPKGDRGFPGTPGIPGPLGHPGPQGPKGQKGSVGDPGMEGPMGQRGREGPMGPRGEAGPPGSGEKGERGAAGEPGPHGPPGVPGSVGPKGSSGSPGPQGPPGPVGLQGLRGEVGLPGVKGDKGPMGPPGPKGDQGEKGPRGLTGEPGMRGLPGAVGEPGAKGAMGPAGPDGHQGPRGEQGLTGMPGIRGPPGPSGDPGKPGLTGPQGPQGLPGTPGRPGIKGEPGAPGKIVTSEGSSMLTVPGPPGPPGAMGPPGPPGAPGPAGPAGLPGHQEVLNLQGPPGPPGPRGPPGPSIPGPPGPRGPPGEGLPGPPGPPGSFLSNSETFLSGPPGPPGPPGPKGDQGPPGPRGHQGEQGLPGFSTSGSSSFGLNLQGPPGPPGPQGPKGDKGDPGVPGALGIPSGPSEGGSSSTMYVSGPPGPPGPPGPPGSISSSGQEIQQYISEYMQSDSIRSYLSGVQGPPGPPGPPGPVTTITGETFDYSELASHVVSYLRTSGYGVSLFSSSISSEDILAVLQRDDVRQYLRQYLMGPRGPPGPPGASGDGSLLSLDYAELSSRILSYMSSSGISIGLPGPPGPPGLPGTSYEELLSLLRGSEFRGIVGPPGPPGPPGIPGNVWSSISVEDLSSYLHTAGLSFIPGPPGPPGPPGPRGPPGVSGALATYAAENSDSFRSELISYLTSPDVRSFIVGPPGPPGPQGPPGDSRLLSTDASHSRGSSSSSHSSSVRRGSSYSSSMSTGGGGAGSLGAGGAFGEAAGDRGPYGTDIGPGGGYGAAAEGGMYAGNGGLLGADFAGDLDYNELAVRVSESMQRQGLLQGMAYTVQGPPGQPGPQGPPGISKVFSAYSNVTADLMDFFQTYGAIQGPPGQKGEMGTPGPKGDRGPAGPPGHPGPPGPRGHKGEKGDKGDQVYAGRRRRRSIAVKP

SEQ ID NO: 207 - protein, 169 aa, Homo sapiens
MLATRVFSLVGKRAISTSVCVRAHESVVKSEDFSLPAYMDRRDHPLPEVAHVKHLSASQKALKEKEKASWSSLSMDEKVELYRIKFKESFAEMNRGSNEWKTVVGGAMFFIGFTALVIMWQKHYVYGPLPQSFDKEWVAKQTKRMLDMKVNPIQGLASKWDYEKNEWKK

SEQ ID NO: 208 - protein, 614 aa, Homo sapiens
MGGVHVAYRGGAGVAGAVWTVMAATVATAAAVAPAPAPGTDSASSVHWFRKGLRLHDNPALLAAVRGARCVRCVYILDPWFAASSSVGINRWRFLLQSLEDLDTSLRKLNSRLFVVRGQPADVFPRLFKEWGVTRLTFEYDSEPFGKERDAAIMKMAKEAGVEVVTENSHTLYDLDRIIELNGQKPPLTYKRFQAIISRMELPKKPVGLVTSQQMESCRAEIQENHDETYGVPSLEELGFPTEGLGPAVWQGGETEALARLDKHLERKAWVANYERPRMNANSLLASPTGLSPYLRFGCLSCRLFYYRLWDLYKKVKRNSTPPLSLFGQLLWREFFYTAATNNPRFDRMEGNPICIQIPWDRNPEALAKWAEGKTGFPWIDAIMTQLRQEGWIHHLARHAVACFLTRGDLWVSWESGVRVFDELLLDADFSVNAGSWMWLSCSAFFQQFFHCYCPVGFGRRTDPSGDYIRRYLPKLKAFPSRYIYEPWNAPESIQKAAKCIIGVDYPRPIVNHAETSRLNIERMKQIYQQLSRYRGLCLLASVPSCVEDLSHPVAEPSSSQAGSMSSAGPRPLPSGPASPKRKLEAAEEPPGEELSKRARVAELPTPELPSKDA

SEQ ID NO: 209 - protein, 145 aa, Homo sapiens
MRAAGTLLAFCCLVLSTTGGPSPDTCSQDLNSRVKPGFPKTIKTNDPGVLQAARYSVEKFNNCTNDMFLFKESRITRALVQIVKGLKYMLEVEIGRTTCKKNQHLRLDDCDFQTNHTLKQTLSCYSEVWVVPWLQHFEVPVLRCH

SEQ ID NO: 210 - protein, 251 aa, Homo sapiens
MEGGAAAATPTALPYYVAFSQLLGLTLVAMTGAWLGLYRGGIAWESDLQFNAHPLCMVIGLIFLQGNALLVYRVFRNEAKRTTKVLHGLLHIFALVIALVGLVAVFDYHRKKGYADLYSLHSWCGILVFVLYFVQWLVGFSFFLFPGASFSLRSRYRPQHIFFGATIFLLSVGTALLGLKEALLFNLGGKYSAFEPEGVLANVLGLLLACFGGAVLYILTRADWKRPSQAEEQALSMDFKTLTEGDSPGSQ

SEQ ID NO: 211 - protein, 956 aa, Homo sapiens
MSSGLWSQEKVTSPYWEERIFYLLLQECSVTDKQTQKLLKVPKGSIGQYIQDRSVGHSRIPSAKGKKNQIGLKILEQPHAVLFVDEKDVVEINEKFTELLLAITNCEERFSLFKNRNRLSKGLQIDVGCPVKVQLRSGEEKFPGVVRFRGPLLAERTVSGIFFGVELLEEGRGQGFTDGVYQGKQLFQCDEDCGVFVALDKLELIEDDDTALESDYAGPGDTMQVELPPLEINSRVSLKVGETIESGTVIFCDVLPGKESLGYFVGVDMDNPIGNWDGRFDGVQLCSFACVESTILLHINDIIPALSESVTQERRPPKLAFMSRGVGDKGSSSHNKPKATGSTSDPGNRNRSELFYTLNGSSVDSQPQSKSKNTWYIDEVAEDPAKSLTEISTDFDRSSPPLQPPPVNSLTTENRFHSLPFSLTKMPNTNGSIGHSPLSLSAQSVMEELNTAPVQESPPLAMPPGNSHGLEVGSLAEVKENPPFYGVIRWIGQPPGLNEVLAGLELEDECAGCTDGTFRGTRYFTCALKKALFVKLKSCRPDSRFASLQPVSNQIERCNSLAFGGYLSEVVEENTPPKMEKEGLEIMIGKKKGIQGHYNSCYLDSTLFCLFAFSSVLDTVLLRPKEKNDVEYYSETQELLRTEIVNPLRIYGYVCATKIMKLRKILEKVEAASGFTSEEKDPEEFLNILFHHILRVEPLLKIRSAGQKVQDCYFYQIFMEKNEKVGVPTIQQLLEWSFINSNLKFAEAPSCLIIQMPRFGKDFKLFKKIFPSLELNITDLLEDTPRQCRICGGLAMYECRECYDDPDISAGKIKQFCKTCNTQVHLHPKRLNHKYNPVSLPKDLPDWDWRHGCIPCQNMELFAVLCIETSHYVAFVKYGKDDSAWLFFDSMADRDGGQNGFNIPQVTPCPEVGEYLKMSLEDLHSLDSRRIQGCARRLLCDAYMCMYQSPTMSLYK

SEQ ID NO: 212 - protein, 735 aa, Homo sapiens
MAKERGLISPSDFAQLQKYMEYSTKKVSDVLKLFEDGEMAKYVQGDAIGYEGFQQFLKIYLEVDNVPRHLSLALFQSFETGHCLNETNVTKDVVCLNDVSCYFSLLEGGRPEDKLEFTFKLYDTDRNGILDSSEVDKIILQMMRVAEYLDWDVSELRPILQEMMKEIDYDGSGSVSQAEWVRAGATTVPLLVLLGLEMTLKDDGQHMWRPKRFPRPVYCNLCESSIGLGKQGLSCNLCKYTVHDQCAMKALPCEVSTYAKSRKDIGVQSHVWVRGGCESGRCDRCQKKIRIYHSLTGLHCVWCHLEIHDDCLQAVGHECDCGLLRDHILPPSSIYPSVLASGPDRKNSKTSQKTMDDLNLSTSEALRIDPVPNTHPLLVFVNPKSGGKQGQRVLWKFQYILNPRQVFNLLKDGPEIGLRLFKDVPDSRILVCGGDGTVGWILETIDKANLPVLPPVAVLPLGTGNDLARCLRWGGGYEGQNLAKILKDLEMSKVVHMDRWSVEVIPQQTEEKSDPVPFQIINNYFSIGVDASIAHRFHIMREKYPEKFNSRMKNKLWYFEFATSESIFSTCKKLEESLTVEICGKPLDLSNLSLEGIAVLNIPSMHGGSNLWGDTRRPHGDIYGINQALGATAKVITDPDILKTCVPDLSDKRLEVVGLEGAIEMGQIYTKLKNAGRRLAKCSEITFHTTKTLPMQIDGEPWMQTPCTIKITHKNQMPMLMGPPPRSTNFFGFLS

SEQ ID NO: 213 - protein, 302 aa, Homo sapiens
MVWKRLGALVMFPLQMIYLVVKAAVGLVLPAKLRDLSRENVLITGGGRGIGRQLAREFAERGARKIVLWGRTEKCLKETTEEIRQMGTECHYFICDVGNREEVYQTAKAVREKVGDITILVNNAAVVHGKSLMDSDDDALLKSQHINTLGQFWTTKAFLPRMLELQNGHIVCLNSVLALSAIPGAIDYCTSKASAFAFMESLTLGLLDCPGVSATTVLPFHTSTEMFQGMRVRFPNLFPPLKPETVARRTVEAVQLNQALLLLPWTMHALVILKSILPQAALEEIHKFSGTYTCMNTFKGRT

SEQ ID NO: 214 - protein, 485 aa, Homo sapiens [sequence omitted]

SEQ ID NO: 215 - protein, 486 aa, Homo sapiens
MQPSGLEGPGTFGRWPLLSLLLLLLLLQPVTCAYTTPGPPRALTTLGAPRAHTMPGTYAPSTTLSSPSTQGLQEQARALMRDFPLVDGHNDLPLVLRQVYQKGLQDVNLRNFSYGQTSLDRLRDGLVGAQFWSAYVPCQTQDRDALRLTLEQIDLIRRMCASYSELELVTSAKALNDTQKLACLIGVEGGHSLDNSLSILRTFYMLGVRYLTLTHTCNTPWAESSAKGVHSFYNNISGLTDFGEKVVAEMNRLGMMVDLSHVSDAVARRALEVSQAPVIFSHSAARGVCNSARNVPDDILQLLKKNGGVVMVSLSMGVIQCNPSANVSTVADHFDHIKAVIGSKFIGIGGDYDGAGKFPQGLEDVSTYPVLIEELLSRGWSEEELQGVLRGNLLRVFRQVEKVQEENKWQSPLEDKFPDEQLSSSCHSDLSRLRQRQSLTSGQELTEIPIHWTAKLPAKWSVSESSPHMAPVLAVVATFPVLILWL

SEQ ID NO: 216 - protein, 437 aa, Homo sapiens
MAAGTLYTYPENWRAFKALIAAQYSGAQVRVLSAPPHFHFGQTNRTPEFLRKFPAGKVPAFEGDDGFCVFESNAIAYYVSNEELRGSTPEAAAQVVQWVSFADSDIVPPASTWVFPTLGIMHHNKQATENAKEEVRRILGLLDAYLKTRTFLVGERVTLADITVVCTLLWLYKQVLEPSFRQAFPNTNRWFLTCINQPQFRAVLGEVKLCEKMAQFDAKKFAETQPKKDTPRKEKGSREEKQKPQAERKEEKKAAAPAPEEEMDECEQALAAEPKAKDPFAHLPKSTFVLDEFKRKYSNEDTLSVALPYFWEHFDKDGWSLWYSEYRFPEELTQTFMSCNLITGMFQRLDKLRKNAFASVILFGTNNSSSISGVWVFRGQELAFPLSPDWQVDYESYTWRKLDPGSEETQTLVREYFSWEGAFQHVGKAFNQGKIFK

SEQ ID NO: 217 - protein, 534 aa, Homo sapiens
MFSWVSKDARRKKEPELFQTVAEGLRQLYAQKLLPLEEHYRFHEFHSPALEDADFDNKPMVLLVGQYSTGKTTFIRHLIEQDFPGMRIGPEPTTDSFIAVMHGPTEGVVPGNALVVDPRRPFRKLNAFGNAFLNRFMCAQLPNPVLDSISIIDTPGILSGEKQRISRGYDFAAVLEWFAERVDRIILLFDAHKLDISDEFSEVIKALKNHEDKIRVVLNKADQIETQQLMRVYGALMWSLGKIINTPEVVRVYIGSFWSHPLLIPDNRKLFEAEEQDLFKDIQSLPRNAALRKLNDLIKRARLAKVHAYIISSLKKEMPNVFGKESKKKELVNNLGEIYQKIEREHQISPGDFPSLRKMQELLQTQDFSKFQALKPKLLDTVDDMLANDIARLMVMVRQEESLMPSQVVKGGAFDGTMNGPFGHGYGEGAGEGIDDVEWVVGKDKPTYDEIFYTLSPVNGKITGANAKKEMVKSKLPNTVLGKIWKLADVDKDGLLDDEEFALANHLIKVKLEGHELPADLPPHLVPPSKRRHE

SEQ ID NO: 218 - protein, 551 aa, Homo sapiens
MAGDLSAGFFMEELNTYRQKQGVVLKYQELPNSGPPHDRRFTFQVIIDGREFPEGEGRSKKEAKNAAAKLAVEILNKEKKAVSPLLLTTTNSSEGLSMGNYIGLINRIAQKKRLTVNYEQCASGVHGPEGFHYKCKMGQKEYSIGTGSTKQEAKQLAAKLAYLQILSEETSVKSDYLSSGSFATTCESQSNSLVTSTLASESSSEGDFSADTSEINSNSDSLNSSSLLMNGLRNNQRKAKRSLAPRFDLPDMKETKYTVDKRFGMDFKEIELIGSGGFGQVFKAKHRIDGKTYVIKRVKYNNEKAEREVKALAKLDHVNIVHYNGCWDGFDYDPETSDDSLESSDYDPENSKNSSRSKTKCLFIQMEFCDKGTLEQWIEKRRGEKLDKVLALELFEQITKGVDYIHSKKLIHRDLKPSNIFLVDTKQVKIGDFGLVTSLKNDGKRTRSKGTLRYMSPEQISSQDYGKEVDLYALGLILAELLHVCDTAFETSKFFTDLRDGIISDIFDKKEKTLLQKLLSKKPEDRPNTSEILRTLTVWKKSPEKNERHTC

SEQ ID NO: 219 - protein, 472 aa, Homo sapiens
MAGGEAGVTLGQPHLSRQDLTTLDVTKLTPLSHEVISRQATINIGTIGHVAHGKSTVVKAISGVHTVRFKNELERNITIKLGYANAKIYKLDDPSCPRPECYRSCGSSTPDEFPTDIPGTKGNFKLVRHVSFVDCPGHDILMATMLNGAAVMDAALLLIAGNESCPQPQTSEHLAAIEIMKLKHILILQNKIDLVKESQAKEQYEQILAFVQGTVAEGAPIIPISAQLKYNIEVVCEYIVKKIPVPPRDFTSEPRLIVIRSFDVNKPGCEVDDLKGGVAGGSILKGVLKVGQEIEVRPGIVSKDSEGKLMCKPIFSKIVSLFAEHNDLQYAAPGGLIGVGTKIDPTLCRADRMVGQVLGAVGALPEIFTELEISYFLLRRLLGVRTEGDKKAAKVQKLSKNEVLMVNIGSLSTGGRVSAVKADLGKIVLTNPVCTEVGEKIALSRRVEKHWRLIGWGQIRRGVTIKPTVDDD

SEQ ID NO: 220 - protein, 611 aa, Homo sapiens
MAASAKKKNKKGKTISLTDFLAEDGGTGGGSTYVSKPVSWADETDDLEGDVSTTWHSNDDDVYRAPPIDRSILPTAPRAAREPNIDRSRLPKSPPYTAFLGNLPYDVTEESIKEFFRGLNISAVRLPREPSNPERLKGFGYAEFEDLDSLLSALSLNEESLGNRRIRVDVADQAQDKDRDDRSFGRDRNRDSDKTDTDWRARPATDSFDDYPPRRGDDSFGDKYRDRYDSDRYRDGYRDGYRDGPRRDMDRYGGRDRYDDRGSRDYDRGYDSRIGSGRRAFGSGYRRDDDYRGGGDRYEDRYDRRDDRSWSSRDDYSRDDYRRDDRGPPQRPKLNLKPRSTPKEDDSSASTSQSTRAASIFGGAKPVDTAAREREVEERLQKEQEKLQRQLDEPKLERRPRERHPSWRSEETQERERSRTGSESSQTGTSTTSSRNARRRESEKSLENETLNKEEDCHSPTSKPPKPDQPLKVMPAPPPKENAWVKRSSNPPARSQSSDTEQQSPTSGGGKVAPAQPSEEGPGRKDENKVDGMNAPKGQTGNSSRGPGDGGNRDHWKESDRKDGKKDQDSRSAPEPKKPEENPASKFSSASKYAALSVDGEDENEGEDYAE

SEQ ID NO: 221 - protein, 555 aa, Homo sapiens
MTLRAAVFDLDGVLALPAVFGVLGRTEEALALPRGLLNDAFQKGGPEGATTRLMKGEITLSQWIPLMEENCRKCSETAKVCLPKNFSIKEIFDKAISARKINRPMLQAALMLRKKGFTTAILTNTWLDDRAERDGLAQLMCELKMHFDFLIESCQVGMVKPEPQIYKFLLDTLKASPSEVVFLDDIGANLKPARDLGMVTILVQDTDTALKELEKVTGIQLLNTPAPLPTSCNPSDMSHGYVTVKPRVRLHFVELGSGPAVCLCHGFPESWYSWRYQIPALAQAGYRVLAMDMKGYGESSAPPEIEEYCMEVLCKEMVTFLDKLGLSQAVFIGHDWGGMLVWYMALFYPERVRAVASLNTPFIPANPNMSPLESIKANPVFDYQLYFQEPGVAEAELEQNLSRTFKSLFRASDESVLSMHKVCEAGGLFVNSPEEPSLSRMVTEEEIQFYVQQFKKSGFRGPLNWYRNMERNWKWACKSLGRKILIPALMVTAEKDFVLVPQMSQHMEDWIPHLKRGHIEDCGHWTQMDKPTEVNQILIKWLDSDARNPPVVSKM

SEQ ID NO: 222 - protein, 441 aa, Homo sapiens
MKAAVDLKPTLTIIKTEKVDLELFPSPDMECADVPLLTPSSKEMMSQALKATFSGFTKEQQRLGIPKDPRQWTETHVRDWVMWAVNEFSLKGVDFQKFCMNGAALCALGKDCFLELAPDFVGDILWEHLEILQKEDVKPYQVNGVNPAYPESRYTSDYFISYGIEHAQCVPPSEFSEPSFITESYQTLHPISSEELLSLKYENDYPSVILRDPLQTDTLQNDYFAIKQEVVTPDNMCMGRTSRGKLGGQDSFESIESYDSCDRLTQSWSSQSSFNSLQRVPSYDSFDSEDYPAALPNHKPKGTFKDYVRDRADLNKDKPVIPAAALAGYTGSGPIQLWQFLLELLTDKSCQSFISWTGDGWEFKLSDPDEVARRWGKRKNKPKMNYEKLSRGLRYYYDKNIIHKTAGKRYVYRFVCDLQSLLGYTPEELHAMLDVKPDADE

SEQ ID NO: 223 - protein, 928 aa, Homo sapiens
MGGSASSQLDEGKCAYIRGKTEAAIKNFSPYYSRQYSVAFCNHVRTEVEQQRDLTSQFLKTKPPLAPGTILYEAELSQFSEDIKKWKERYVVVKNDYAVESYENKEAYQRGAAPKCRILPAGGKVLTSEDEYNLLSDRHFPDPLASSEKENTQPFVVLPKEFPVYLWQPFFRHGYFCFHEAADQKRFSALLSDCVRHLNHDYMKQMTFEAQAFLEAVQFFRQEKGHYGSWEMITGDEIQILSNLVMEELLPTLQTDLLPKMKGKKNDRKRTWLGLLEEAYTLVQHQVSEGLSALKEECRALTKGLEGTIRSDMDQIVNSKNYLIGKIKAMVAQPAEKSCLESVQPFLASILEELMGPVSSGFSEVRVLFEKEVNEVSQNFQTTKDSVQLKEHLDRLMNLPLHSVKMEPCYTKVNLLHERLQDLKSRFRFPHIDLVVQRTQNYMQELMENAVFTFEQLLSPHLQGEASKTAVAIEKVKLRVLKQYDYDSSTIRKKIFQEALVQITLPTVQKALASTCKPELQKYEQFIFADHTNMIHVENVYEEILHQILLDETLKVIKEAAILKKHNLFEDNMALPSESVSSLTDLKPPTGSNQASPARRASAILPGVLGSETLSNEVFQESEEEKQPEVPSSLAKGESLSLPGPSPPPDGTEQVIISRVDDPVVNPVATEDTAGLPGTCSSELEFGGTLEDEEPAQEEPEPITASGSLKALRKLLTASVEVPVDSAPVMEEDTNGESHVPQENEEEEEKEPSQAAAIHPDNCEESEVSEREAQPPCPEAHGEELGGFPEVGSPASPPASGGLTEEPLGPMEGELPGEACTLTAHEGRGGKCTEEGDASQQEGCTLGSDPICLSESQVSEEQEEMGGQSSAAQATASVNAEEIKVARIHECQWVVEDAPNPDVLLSHKDDVKEGEGGQESFPELPSEE

SEQ ID NO: 224 - protein, 417 aa, Homo sapiens
MEFVKCLGHPEEFYNLVRFRIGGKRKVMPKMDQDSLSSSLKTCYKYLNQTSRSFAAVIQALDGEMRNAVCIFYLVLRALDTLEDDMTISVEKKVPLLHNFHSFLYQPDWRFMESKEKDRQVLEDFPTISLEFRNLAEKYQTVIADICRRMGIGMAEFLDKHVTSEQEWDKYCHYVAGLVGIGLSRLFSASEFEDPLVGEDTERANSMGLFLQKTNIIRDYLEDQQGGREFWPQEVWSRYVKKLGDFAKPENIDLAVQCLNELITNALHHIPDVITYLSRLRNQSVFNFCAIPQVMAIATLAACYNNQQVFKGAVKIRKGQAVTLMMDATNMPAVKAIIYQYMEEIYHRIPDSDPSSSKTRQIISTIRTQNLPNCQLISRSHYSPIYLSFVMLLAALSWQYLTTLSQVTEDYVQTGEH

SEQ ID NO: 225 - protein, 2602 aa, Homo sapiens
MPVTEKDLAEDAPWKKIQQNTFTRWCNEHLKCVNKRIGNLQTDLSDGLRLIALLEVLSQKRMYRKYHQRPTFRQMQLENVSVALEFLDRESIKLVSIDSKAIVDGNLKLILGLVWTLILHYSISMPVWEDEGDDDAKKQTPKQRLLGWIQNKIPYLPITNFNQNWQDGKALGALVDSCAPGLCPDWESWDPQKPVDNAREAMQQADDWLGVPQVITPEEIIHPDVDEHSVMTYLSQFPKAKLKPGAPLKPKLNPKKARAYGRGIEPTGNMVKQPAKFTVDTISAGQGDVMVFVEDPEGNKEEAQVTPDSDKNKTYSVEYLPKVTGLHKVTVLFAGQHISKSPFEVSVDKAQGDASKVTAKGPGLEAVGNIANKPTYFDIYTAGAGVGDIGVEVEDPQGKNTVELLVEDKGNQVYRCVYKPMQPGPHVVKIFFAGDTIPKSPFVVQVGEACNPNACRASGRGLQPKGVRIRETTDFKVDTKAAGSGELGVTMKGPKGLEELVKQKDFLDGVYAFEYYPSTPGRYSIAITWGGHHIPKSPFEVQVGPEAGMQKVRAWGPGLHGGIVGRSADFVVESIGSEVGSLGFAIEGPSQAKIEYNDQNDGSCDVKYWPKEPGEYAVHIMCDDEDIKDSPYMAFIHPATGGYNPDLVRAYGPGLEKSGCIVNNLAEFTVDPKDAGKAPLKIFAQDGEGQRIDIQMKNRMDGTYACSYTPVKAIKHTIAVVWGGVNIPHSPYRVNIGQGSHPQKVKVFGPGVERSGLKANEPTHFTVDCTEAGEGDVSVGIKCDARVLSEDEEDVDFDIIHNANDTFTVKYVPPAAGRYTIKVLFASQEIPASPFRVKVDPSHDASKVKAEGPGLSKAGVENGKPTHFTVYTKGAGKAPLNVQFNSPLPGDAVKDLDIIDNYDYSHTVKYTPTQQGNMQVLVTYGGDPIPKSPFTVGVAAPLDLSKIKLNGLENRVEVGKDQEFTVDTRGAGGQGKLDVTILSPSRKVVPCLVTPVTGRENSTAKFIPREEGLYAVDVTYDGHPVPGSPYTVEASLPPDPSKVKAHGPGLEGGLVGKPAEFTIDTKGAGTGGLGLTVEGPCEAKIECSDNGDGTCSVSYLPTKPGEYFVNILFEEVHIPGSPFKADIEMPFDPSKVVASGPGLEHGKVGEAGLLSVDCSEAGPGALGLEAVSDSGTKAEVSIQNNKDGTYAVTYVPLTAGMYTLTMKYGGELVPHFPARVKVEPAVDTSRIKVFGPGIEGKDVFREATTDFTVDSRPLTQVGGDHIKAHIANPSGASTECFVTDNADGTYQVEYTPFEKGLHVVEVTYDDVPIPNSPFKVAVTEGCQPSRVQAQGPGLKEAFTNKPNVFTVVTRGAGIGGLGITVEGPSESKINCRDNKDGSCSAEYIPFAPGDYDVNITYGGAHIPGSPFRVPVKDVVDPSKVKIAGPGLGSGVRARVLQSFTVDSSKAGLAPLEVRVLGPRGLVEPVNVVDNGDGTHTVTYTPSQEGPYMVSVKYADEEIPRSPFKVKVLPTYDASKVTASGPGLSSYGVPASLPVDFAIDARDAGEGLLAVQITDQEGKPKRAIVHDNKDGTYAVTYIPDKTGRYMIGVTYGGDDIPLSPYRIRATQTGDASKCLATGPGIASTVKTGEEVGFVVDAKTAGKGKVTCTVLTPDGTEAEADVIENEDGTYDIFYTAAKPGTYVIYVRFGGVDIPNSPFTVMATDGEVTAVEEAPVNACPPGFRPWVTEEAYVPVSDMNGLGFKPFDLVIPFAVRKGEITGEVHMPSGKTATPEIVDNKDGTVTVRYAPTEVGLHEMHIKYMGSHIPESPLQFYVNYPNSGSVSAYGPGLVYGVANKTATFTIVTEDAGEGGLDLAIEGPSKAEISCIDNKDGTCTVTYLPTLPGDYSILVKYNDKHIPGSPFTAKITDDSRRCSQVKLGSAADFLLDISETDLSSLTASIKAPSGRDEPCLLKRLPNNHIGISFIPREVGEHLVSIKKNGNHVANSPVSIMVVQSEIGDARRAKVYGRGLSEGRTFEMSDFIVDTRDAGYGGISLAVEGPSKVDIQTEDLEDGTCKVSYFPTVPGVYIVSTKFADEHVPGSPFTVKISGEGRVKESITRTSRAPSVATVGSICDLNLKIPEINSSDMSAHVTSPSGRVTEAEIVPMGKNSHCVRFVPQEMGVHTVSVKYRGQHVTGSPFQFTVGPLGEGGAHKVRAGGPGLERGEAGVPAEFSIWTREAGAGGLSIAVEGPSKAEITFDDHKNGSCGVSYIAQEPGNYEVSIKFNDEHIPESPYLVPVIAPSDDARRLTVMSLQESGLKVNQPASFAIRLNGAKGKIDAKVHSPSGAVEECHVSELEPDKYAVRFIPHENGVHTIDVKFNGSHVVGSPFKVRVGEPGQAGNPALVSAYGTGLEGGTTGIQSEFFINTTRAGPGTLSVTIEGPSKVKMDCQETPEGYKVMYTPMAPGNYLISVKYGGPNHIVGSPFKAKVTGQRLVSPGSANETSSILVESVTRSSTETCYSAIPKASSDASKVTSKGAGLSKAFVGQKSSFLVDCSKAGSNMLLIGVHGPTTPCEEVSMKHVGNQQYNVTYVVKERGDYVLAVKWGEEHIPGSPFHVTVP

SEQ ID NO: 226 - protein, 235 aa, Homo sapiens
MTVLAPAWSPTTYLLLLLLLSSGLSGTQDCSFQHSPISSDFAVKIRELSDYLLQDYPVTVASNLQDEELCGGLWRLVLAQRWMERLKTVAGSKMQGLLERVNTEIHFVTKCAFQPPPSCLRFVQTNISRLLQETSEQLVALKPWITRQNFSRCLELQCQPDSSTLPPPWSPRPLEATAPTAPQPPLLLLLLLPVGLLLLAAAWCLHWQRTRRRTPRPGEQVPPVPSPQDLLLVEH

SEQ ID NO: 227 - protein, 603 aa, Homo sapiens
MRRKEKRLLQAVALVLAALVLLPNVGLWALYRERQPDGTPGGSGAAVAPAAGQGSHSRQKKTFFLGDGQKLKDWHDKEAIRRDAQRVGNGEQGRPYPMTDAERVDQAYRENGFNIYVSDKISLNRSLPDIRHPNCNSKRYLETLPNTSIIIPFHNEGWSSLLRTVHSVLNRSPPELVAEIVLVDDFSDREHLKKPLEDYMALFPSVRILRTKKREGLIRTRMLGASVATGDVITFLDSHCEANVNWLPPLLDRIARNRKTIVCPMIDVIDHDDFRYETQAGDAMRGAFDWEMYYKRIPIPPELQKADPSDPFESPVMAGGLFAVDRKWFWELGGYDPGLEIWGGEQYEISFKVWMCGGRMEDIPCSRVGHIYRKYVPYKVPAGVSLARNLKRVAEVWMDEYAEYIYQRRPEYRHLSAGDVAVQKKLRSSLNCKSFKWFMTKIAWDLPKFYPPVEPPAAAWGEIRNVGTGLCADTKHGALGSPLRLEGCVRGRGEAAWNNMQVFTFTWREDIRPGDPQHTKKFCFDAISHTSPVTLYDCHSMKGNQLWKYRKDKTLYHPVSGSCMDCSESDHRIFMNTCNPSSLTQQWLFEHTNSTVLEKFNRN

SEQ ID NO: 228 - protein, 605 aa, Homo sapiens
MVRHQPLQYYEPQLCLSCLTGIYGCRWKRYQRSHDDTTPWERLWFLLLTFTFGLTLTWLYFWWEVHNDYDEFNWYLYNRMGYWSDWPVPILVTTAAAFAYIAGLLVLALCHIAVGQQMNLHWLHKIGLVVILASTVVAMSAVAQLWEDEWEVLLISLQGTAPFLHVGAVAAVTMLSWIVAGQFARAERTSSQVTILCTFFTVVFALYLAPLTISSPCIMEKKDLGPKPALIGHRGAPMLAPEHTLMSFRKALEQKLYGLQADITISLDGVPFLMHDTTLRRTTNVEEEFPELARRPASMLNWTTLQRLNAGQWFLKTDPFWTASSLSPSDHREAQNQSICSLAELLELAKGNATLLLNLRDPPREHPYRSSFINVTLEAVLHSGFPQHQVMWLPSRQRPLVRKVAPGFQQTSGSKEAVASLRRGHIQRLNLRYTQVSRQELRDYASWNLSVNLYTVNAPWLFSLLWCAGVPSVTSDNSHALSQVPSPLWIMPPDEYCLMWVTADLVSFTLIVGIFVLQKWRLGGIRSYNPEQIMLSAAVRRTSRDVSIMKEKLIFSEISDGVEVSDVLSVCSDNSYDTYANSTATPVGPRGGGSHTKTLIERSGR

SEQ ID NO: 229 - protein, 422 aa, Homo sapiens
MPRSFLVKSKKAHSYHQPRSPGPDYSLRLENVPAPSRADSTSNAGGAKAEPRDRLSPESQLTEAPDRASASPDSCEGSVCERSSEFEDFWRPPSPSASPASEKSMCPSLDEAQPFPLPFKPYSWSGLAGSDLRHLVQSYRPCGALERGAGLGLFCEPAPEPGHPAALYGPKRAAGGAGAGAPGSCSAGAGATAGPGLGLYGDFGSAAAGLYERPTAAAGLLYPERGHGLHADKGAGVKVESELLCTRLLLGGGSYKCIKCSKVFSTPHGLEVHVRRSHSGTRPFACEMCGKTFGHAVSLEQHKAVHSQERSFDCKICGKSFKRSSTLSTHLLIHSDTRPYPCQYCGKRFHQKSDMKKHTFIHTGEKPHKCQVCGKAFSQSSNLITHSRKHTGFKPFGCDLCGKGFQRKVDLRRHRETQHGLK

SEQ ID NO: 230 - protein, 68 aa, Homo sapiens
MSATNNIAQARKLVEQLRIEAGIERIKVSKAASDLMSYCEQHARNDPLLVGVPASENPFKDKKPCIIL

SEQ ID NO: 231 - protein, 304 aa, Homo sapiens
MLSTGVVSFFSLKSDSAPPWMVLAVLWCSMAQTLLLPSFIWSCERYRADVRTVWEQCVAIMSEEDGDDDGGCDDYAEGRVCKVRFDANGATGPGSRDPAQVKLLPGRHMLFPPLERVHYLQVPLSRRLSHDETNIFSTPREPGSFLHKWSSSDDIRVLPAQSRALGGPPEYLGQRHRLEDEEDEEEAEGGGLASLRQFLESGVLGSGGGPPRGPGFFREEITTFIDETPLPSPTASPGHSPRRPRPLGLSPRRLSLGSPESRAVGLPLGLSAGRRCSLTGGEESARAWGGSWGPGNPIFPQLTL

SEQ ID NO: 232 - protein, 693 aa, Homo sapiens
MTPQSLLQTTLFLLSLLFLVQGAHGRGHREDFRFCSQRNQTHRSSLHYKPTPDLRISIENSEEALTVHAPFPAAHPASRSFPDPRGLYHFCLYWNRHAGRLHLLYGKRDFLLSDKASSLLCFQHQEESLAQGPPLLATSVTSWWSPQNISLPSAASFTFSFHSPPHTAAHNASVDMCELKRDLQLLSQFLKHPQKASRRPSAAPASQQLQSLESKLTSVRFMGDMVSFEEDRINATVWKLQPTAGLQDLHIHSRQEEEQSEIMEYSVLLPRTLFQRTKGRSGEAEKRLLLVDFSSQALFQDKNSSQVLGEKVLGIVVQNTKVANLTEPVVLTFQHQLQPKNVTLQCVFWVEDPTLSSPGHWSSAGCETVRRETQTSCFCNHLTYFAVLMVSSVEVDAVHKHYLSLLSYVGCVVSALACLVTIAAYLCSRVPLPCRRKPRDYTIKVHMNLLLAVFLLDTSFLLSEPVALTGSEAGCRASAIFLHFSLLTCLSWMGLEGYNLYRLVVEVFGTYVPGYLLKLSAMGWGFPIFLVTLVALVDVDNYGPIILAVHRTPEGVIYPSMCWIRDSLVSYITNLGLFSLVFLFNMAMLATMVVQILRLRPHTQKWSHVLTLLGLSLVLGLPWALIFFSFASGTFQLVVLYLFSIITSFQGFLIFIWYWSMRLQARGGPSPLKSNSDSARLPISSGSTSSSRI

SEQ ID NO: 233 - protein, 446 aa, Homo sapiens
MAARKGRRRTCETGEPMEAESGDTSSEGPAQVYLPGRGPPLREGEELVMDEEAYVLYHRAQTGAPCLSFDIVRDHLGDNRTELPLTLYLCAGTQAESAQSNRLMMLRMHNLHGTKPPPSEGSDEEEEEEDEEDEEERKPQLELAMVPHYGGINRVRVSWLGEEPVAGVWSEKGQVEVFALRRLLQVVEEPQALAAFLRDEQAQMKPIFSFAGHMGEGFALDWSPRVTGRLLTGDCQKNIHLWTPTDGGSWHVDQRPFVGHTRSVEDLQWSPTENTVFASCSADASIRIWDIRAAPSKACMLTTATAHDGDVNVISWSRREPFLLSGGDDGALKIWDLRQFKSGSPVATFKQHVAPVTSVEWHPQDSGVFAASGADHQITQWDLAVERDPEAGDVEADPGLADLPQQLLFVHQGETELKELHWHPQCPGLLVSTALSGFTIFRTISV

SEQ ID NO: 234 - protein, 262 aa, Homo sapiens
MRNSYRFLASSLSVVVSLLLIPEDVCEKIIGGNEVTPHSRPYMVLLSLDRKTICAGALIAKDWVLTAAHCNLNKRSQVILGAHSITREEPTKQIMLVKKEFPYPCYDPATREGDLKLLQLMEKAKINKYVTILHLPKKGDDVKPGTMCQVAGWGRTHNSASWSDTLREVNITIIDRKVCNDRNHYNFNPVIGMNMVCAGSLRGGRDSCNGDSGSPLLCEGVFRGVTSFGLENKCGDPRGPGVYILLSKKHLNWIIMTIKGAV

SEQ ID NO: 235 - protein, 1024 aa, Homo sapiens
MERRSRRKSRRNGRSTAGKAAATQPAKSPGAQLWLFPSAAGLHRALLRRVEVTRQLCCSPGRLAVLERGGAGVQVHQLLAGSGGARTPKCIKLGKNMKIHSVDQGAEHMLILSSDGKPFEYDNYSMKHLRFESILQEKKIIQITCGDYHSLALSKGGELFAWGQNLHGQLGVGRKFPSTTTPQIVEHLAGVPLAQISAGEAHSMALSMSGNIYSWGKNECGQLGLGHTESKDDPSLIEGLDNQKVEFVACGGSHSALLTQDGLLFTFGAGKHGQLGHNSTQNELRPCLVAELVGYRVTQIACGRWHTLAYVSDLGKVFSFGSGKDGQLGNGGTRDQLMPLPVKVSSSEELKLESHTSEKELIMIAGGNQSILLWIKKENSYVNLKRTIPTLNEGTVKRWIADVETKRWQSTKREIQEIFSSPACLTGSFLRKRRTTEMMPVYLDLNKARNIFKELTQKDWITNMITTCLKDNLLKRLPFHSPPQEALEIFFLLPECPMMHISNNWESLVVPFAKVVCKMSDQSSLVLEEYWATLQESTFSKLVQMFKTAVICQLDYWDESAEENGNVQALLEMLKKLHRVNQVKCQLPESIFQVDELLHRLNFFVEVCRRYLWKMTVDASENVQCCVIFSHFPFIFNNLSKIKLLHTDTLLKIESKKHKAYLRSAAIEEERESEFALRPTFDLTVRRNHLIEDVLNQLSQFENEDLRKELWVSFSGEIGYDLGGVKKEFFYCLFAEMIQPEYGMFMYPEGASCMWFPVKPKFEKKRYFFFGVLCGLSLFNCNVANLPFPLALFKKLLDQMPSLEDLKELSPDLGKNLQTLLDDEGDNFEEVFYIHFNVHWDRNDTNLIPNGSSITVNQTNKRDYVSKYINYIFNDSVKAVYEEFRRGFYKMCDEDIIKLFHPEELKDVIVGNTDYDWKTFEKNARYEPGYNSSHPTIVMFWKAFHKLTLEEKKKFLVFLTGTDRLQMKDLNNMKITFCCPESWNERDPIRALTCFSVLFLPKYSTMETVEEALQEAINNNRGFG

SEQ ID NO: 236 - protein, 1022 aa, Homo sapiens
MYFCWGADSRELQRRRTAGSPGAELLQAASGERHSLLLLTNHRVLSCGDNSRGQLGRRGAQRGELPEPIQALETLIVDLVSCGKEHSLAVCHKGRVFAWGAGSEGQLGIGEFKEISFTPKKIMTLNDIKIIQVSCGHYHSLALSKDSQVFSWGKNSHGQLGLGKEFPSQASPQRVRSLEGIPLAQVAAGGAHSFALSLCGTSFGWGSNSAGQLALSGRNVPVQSNKPLSVGALKNLGVVYISCGDAHTAVLTQDGKVFTFGDNRSGQLGYSPTPEKRGPQLVERIDGLVSQIDCGSYHTLAYVHTTGQVVSFGHGPSDTSKPTHPEALTENFDISCLISAEDFVDVQVKHIFAGTYANFVTTHQDTSSTRAPGKTLPEISRISQSMAEKWIAVKRRSTEHEMAKSEIRMIFSSPACLTASFLKKRGTGETTSIDVDLEMARDTFKKLTKKEWISSMITTCLEDDLLRALPCHSPHQEALSVFLLLPECPVMHDSKNWKNLVVPFAKAVCEMSKQSLQVLKKCWAFLQESSLNPLIQMLKAAIISQLLHQTKTEQDHCNVKALLGMMKELHKVNKANCRLPENTFNINELSNLLNFYIDRGRQLFRDNHLIPAETPSPVIFSDFPFIFNSLSKIKLLQADSHIKMQMSEKKAYMLMHETILQKKDEFPPSPRFILRVRRSRLVKDALRQLSQAEATDFCKVLVVEFINEICPESGGVSSEFFHCMFEEMTKPEYGMFMYPEMGSCMWFPAKPKPEKKRYFLFGMLCGLSLFNLNVANLPFPLALYKKLLDQKPSLEDLKELSPRLGKSLQEVLDDAADDIGDALCIRFSIHWDQNDVDLIPNGISIPVDQTNKRDYVSKYIDYIFNVSVKAVYEEFQRGFYRVCEKEILRHFYPEELMTAIIGNTDYDWKQFEQNSKYEQGYQKSHPTIQLFWKAFHKLTLDEKKKFLFFLTGRDRLHARGIQKMEIVFRCPETFSERDHPTSITCHNILSLPKYSTMERMEEALQVAINNNRGFVSPMLTQS

SEQ ID NO: 237 - protein, 615 aa, Homo sapiens
MVSGPLALRWCAWAGRGDMGPDMELPSHSKQLLLQLNQQRTKGFLCDVIIMVENSIFRAHKNVLAASSIYFKSLVLHDNLINLDTDMVSSTVFQQILDFIYTGKLLPSDQPAEPNFSTLLTAASYLQLPELAALCRRKLKRAGKPFGSGRAGSTGMGRPPRSQRLSTASVIQARYQGLVDGRKGAHAPQELPQAKGSDDELFLGGSNQDSVQGLGRAVCPAGGEAGLGGCSSSTNGSSGGCEQELGLDLSKKSPPLPPATPGPHLTPDDAAQLSDSQHGSPPAASAPPVANSASYSELGGTPDEPMDLEGAEDNHLSLLEAPGGQPRKSLRHSTRKKEWGKKEPVAGSPFERREAGPKGPCPGEEGEGVGDRVPNGILASGAGPSGPYGEPPYPCKEEEENGKDASEDSAQSGSEGGSGHASAHYMYRQEGYETVSYGDNLYVCIPCAKGFPSSEQLNAHVETHTEEELFIKEEGAYETGSGGAEEEAEDLSAPSAAYTAEPRPFKCSVCEKTYKDPATLRQHEKTHWLTRPFPCNICGKMFTQRGTMTRHMRSHLGLKPFACDECGMRFTRQYRLTEHMRVHSGEKPYECQLCGGKFTQQRNLISHLRMHTSPS

SEQ ID NO: 238 - protein, 261 aa, Homo sapiens
MASQLQNRLRSALALVTGAGSGIGRAVSVRLAGEGATVAACDLDRAAAQETVRLLGGPGSKEGPPRGNHAAFQADVSEARAARCLLEQVQACFSRPPSVVVSCAGITQDEFLLHMSEDDWDKVIAVNLKGTFLVTQAAAQALVSNGCRGSIINISSIVGKVGNVGQTNYAASKAGVIGLTQTAARELGRHGIRCNSVLPGFIATPMTQKVPQKVVDKITEMIPMGHLGDPEDVADVVAFLASEDSGYITGTSVEVTGGLFM

SEQ ID NO: 239 - protein, 275 aa, Homo sapiens
MSSFGYRTLTVALFTLICCPGSDEKVFEVHVRPKKLAVEPKGSLEVNCSTTCNQPEVGGLETSLDKILLDEQAQWKHYLVSNISHDTVLQCHFTCSGKQESMNSNVSVYQPPRQVILTLQPTLVAVGKSFTIECRVPTVEPLDSLTLFLFRGNETLHYETFGKAAPAPQEATATFNSTADREDGHRNFSCLAVLDLMSRGGNIFHKHSAPKMLEIYEPVSDSQMVIIVTVVSVLLSLFVTSVLLCFIFGQHLRQQRMGTYGVRAAWRRLPQAFRP

SEQ ID NO: 240 - protein, 729 aa, Homo sapiens
MGKKYKNIVLLKGLEVINDYHFRMVKSLLSNDLKLNLKMREEYDKIQIADLMEEKFRGDAGLGKLIKIFEDIPTLEDLAETLKKEKLKVKGPALSRKRKKEVDATSPAPSTSSTVKTEGAEATPGAQKRKKSTKEKAGPKGSKVSEEQTQPPSPAGAGMSTAMGRSPSPKTSLSAPPNSSSTENPKTVAKCQVTPRRNVLQKRPVIVKVLSTTKPFEYETPEMEKKIMFHATVATQTQFFHVKVLNTSLKEKFNGKKIIIISDYLEYDSLLEVNEESTVSEAGPNQTFEVPNKIINRAKETLKIDILHKQASGNIVYGVFMLHKKTVNQKTTIYEIQDDRGKMDVVGTGQCHNIPCEEGDKLQLFCFRLRKKNQMSKLISEMHSFIQIKKKTNPRNNDPKSMKLPQEQRQLPYPSEASTTFPESHLRTPQMPPTTPSSSFFTKKSEDTISKMNDFMRMQILKEGSHFPGPFMTSIGPAESHPHTPQMPPSTPSSSFLTTLKPRLKTEPEEVSIEDSAQSDLKEVMVLNATESFVYEPKEQKKMFHATVATENEVFRVKVFNIDLKEKFTPKKIIAIANYVCRNGFLEVYPFTLVADVNADRNMEIPKGLIRSASVTPKINQLCSQTKGSFVNGVFEVHKKNVRGEFTYYEIQDNTGKMEVVVHGRLTTINCEEGDKLKLTCFELAPKSGNTGELRSVIHSHIKVIKTRKNKKDILNPDSSMETSPDFFF

SEQ ID NO: 241 - protein, 444 aa, Homo sapiens
MAVTTRLTWLHEKILQNHFGGKRLSLLYKGSVHGFRNGVLLDRCCNQGPTLTVIYSEDHIIGAYAEESYQEGKYASIILFALQDTKISEWKLGLCTPETLFCCDVTKYNSPTNFQIDGRNRKVIMDLKTMENLGLAQNCTISIQDYEVFRCEDSLDERKIKGVIELRKSLLSALRTYEPYGSLVQQIRILLLGPIGAGKSSFFNSVRSVFQGHVTHQALVGTNTTGISEKYRTYSIRDGKDGKYLPFILCDSLGLSEKEGGLCRDDIFYILNGNIRDRYQFNPMESIKLNHHDYIDSPSLKDRIHCVAFVFDASSIQYFSSQMIVKIKRIRRELVNAGVVHVALLTHVDSMDLITKGDLIEIERCEPVRSKLEEVQRKLGFALSDISVVSNYSSEWELDPVKDVLILSALRRMLWAADDFLEDLPFEQIGNLREEIINCAQGKK

SEQ ID NO: 242 - protein, 125 aa, Homo sapiens
MHKEEHEVAVLGPPPSTILPRSTVINIHSETSVPDHVVWSLFNTLFLNWCCLGFIAFAYSVKSRDRKMVGDVTGAQAYASTAKCLNIWALILGILMTIGFILLLVFGSVTVYHIMLQIIQEKRGY

SEQ ID NO: 243 - protein, 419 aa, Homo sapiens
MNRHLWKSQLCEMVQPSGGPAADQDVLGEESPLGKPAMLHLPSEQGAPETLQRCLEENQELRDAIRQSNQILRERCEELLHFQASQREEKEFLMCKFQEARKLVERLGLEKLDLKRQKEQALREVEHLKRCQQQMAEDKASVKAQVTSLLGELQESQSRLEAATKECQALEGRARAASEQARQLESEREALQQQHSVQVDQLRMQGQSVEAALRMERQAASEEKRKLAQLQVAYHQLFQEYDNHIKSSVVGSERKRGMQLEDLKQQLQQAEEALVAKQEVIDKLKEEAEQHKIVMETVPVLKAQADIYKADFQAERQAREKLAEKKELLQEQLEQLQREYSKLKASCQESARIEDMRKRHVEVSQAPLPPAPAYLSSPLALPSQRRSPPEEPPDFCCPKCQYQAPDMDTLQIHVMECIE

SEQ ID NO: 244 - protein, 825 aa, Homo sapiens
MGWLCSGLLFPVSCLVLLQVASSGNMKVLQEPTCVSDYMSISTCEWKMNGPTNCSTELRLLYQLVFLLSEAHTCIPENNGGAGCVCHLLMDDVVSADNYTLDLWAGQQLLWKGSFKPSEHVKPRAPGNLTVHTNVSDTLLLTWSNPYPPDNYLYNHLTYAVNIWSENDPADFRIYNVTYLEPSLRIAASTLKSGISYRARVRAWAQCYNTTWSEWSPSTKWHNSYREPFEQHLLLGVSVSCIVILAVCLLCYVSITKIKKEWWDQIPNPARSRLVAIIIQDAQGSQWEKRSRGQEPAKCPHWKNCLTKLLPCFLEHNMKRDEDPHKAAKEMPFQGSGKSAWCPVEISKTVLWPESISVVRCVELFEAPVECEEEEEVEEEKGSFCASPESSRDDFQEGREGIVARLTESLFLDLLGEENGGFCQQDMGESCLLPPSGSTSAHMPWDEFPSAGPKEAPPWGKEQPLHLEPSPPASPTQSPDNLTCTETPLVIAGNPAYRSFSNSLSQSPCPRELGPDPLLARHLEEVEPEMPCVPQLSEPTTVPQPEPETWEQILRRNVLQHGAAAAPVSAPTSGYQEFVHAVEQGGTQASAVVGLGPPGEAGYKAFSSLLASSAVSPEKCGFGASSGEEGYKPFQDLIPGCPGDPAPVPVPLFTFGLDREPPRSPQSSHLPSSSPEHLGLEPGEKVEDMPKPPLPQEQATDPLVDSLGSGIVYSALTCHLCGHLKQCHGQEDGGQTPVMASPCCGCCCGDRSSPPTTPLRAPDPSPGGVPLEASLCPASLAPSGISEKSKSSSSFHPAPGNAQSSSQTPKIVNFVSVGPTYMRVS

SEQ ID NO: 245 - protein, 267 aa, Homo sapiens
MVKISFQPAVAGIKGDKADKASASAPAPASATEILLTPAREEQPPQHRSKRGGSVGGVCYLSMGMVVLLMGLVFASVYIYRYFFLAQLARDNFFRCGVLYEDSLSSQVRTQMELEEDVKIYLDENYERINVPVPQFGGGDPADIIHDFQRGLTAYHDISLDKCYVIELNTTIVLPPRNFWELLMNVKRGTYLPQTYIIQEEMVVTEHVSDKEALGSFIYHLCNGKDTYRLRRRATRRRINKRGAKNCNAIRHFENTFVVETLICGVV

SEQ ID NO: 246 - protein, 946 aa, Homo sapiens
MAVYCYALNSLVIMNSANEMKSGGGPGPSGSETPPPPRRAVLSPGSVFSPGRGASFLFPPAESLSPEEPRSPGGWRSGRRRLNSSSGSGSGSSGSSVSSPSWAGRLRGDRQQVVAAGTLSPPGPEEAKRKLRILQRELQNVQVNQKVGMFEAHIQAQSSAIQAPRSPRLGRARSPSPCPFRSSSQPPGRVLVQGARSEERRTKSWGEQCPETSGTDSGRKGGPSLCSSQVKKGMPPLPGRAAPTGSEAQGPSAFVRMEKGIPASPRCGSPTAMEIDKRGSPTPGTRSCLAPSLGLFGASLTMATEVAARVTSTGPHRPQDLALTEPSGRARELEDLQPPEALVERQGQFLGSETSPAPERGGPRDGEPPGKMGKGYLPCGMPGSGEPEVGKRPEETTVSVQSAESSDSLSWSRLPRALASVGPEEARSGAPVGGGRWQLSDRVEGGSPTLGLLGGSPSAQPGTGNVEAGIPSGRMLEPLPCWDAAKDLKEPQCPPGDRVGVQPGNSRVWQGTMEKAGLAWTRGTGVQSEGTWESQRQDSDALPSPELLPQDPDKPFLRKACSPSNIPAVIITDMGTQEDGALEETQGSPRGNLPLRKLSSSSASSTGFSSSYEDSEEDISSDPERTLDPNSAFLHTLDQQKPRVSKSWRKIKNMVHWSPFVMSFKKKYPWIQLAGHAGSFKAAANGRILKKHCESEQRCLDRLMVDVLRPFVPAYHGDVVKDGERYNQMDDLLADFDSPCVMDCKMGIRTYLEEELTKARKKPSLRKDMYQKMIEVDPEAPTEEEKAQRAVTKPRYMQWRETISSTATLGFRIEGIKKEDGTVNRDFKKTKTREQVTEAFREFTKGNHNILIAYRDRLKAIRTTLEVSPFFKCHEVIGSSLLFIHDKKEQAKVWMIDFGKTTPLPEGQTLQHDVPWQEGNREDGYLSGLNNLVDILTEMSQDAPLA

SEQ ID NO: 247 - protein, 1826 aa, Homo sapiens
MGDSKVKVAVRIRPMNRRETDLHTKCVVDVDANKVILNPVNTNLSKGDARGQPKVFAYDHCFWSMDESVKEKYAGQDIVFKCLGENILQNAFDGYNACIFAYGQTGSGKSYTMMGTADQPGLIPRLCSGLFERTQKEENEEQSFKVEVSYMEIYNEKVRDLLDPKGSRQTLKVREHSVLGPYVDGLSKLAVTSYKDIESLMSEGNKSRTVAATNMNEESSRSHAVFKITLTHTLYDVKSGTSGEKVGKLSLVDLAGSERATKTGAAGDRLKEGSNINKSLTTLGLVISALADQSAGKNKNKFVPYRDSVLTWLLKDSLGGNSKTAMVATVSPAADNYDETLSTLRYADRAKHIVNHAVVNEDPNARIIRDLREEVEKLREQLTKAEAMKSPELKDRLEESEKLIQEMTVTWEEKLRKTEEIAQERQKQLESLGISLQSSGIKVGDDKCFLVNLNADPALNELLVYYLKEHTLIGSANSQDIQLCGMGILPEHCIIDITSEGQVMLTPQKNTRTFVNGSSVSSPIQLHHGDRILWGNNHFFRLNLPKKKKKAEREDEDQDPSMKNENSSEQLDVDGDSSSEVSSEVNFNYEYAQMEVTMKALGSNDPMQSILNSLEQQHEEEKRSALERQRLMYEHELEQLRRRLSPEKQNCRSMDRFSFHSPSAQQRLRQWAEEREATLNNSLMRLREQIVKANLLVREANYIAEELDKRTEYKVTLQIPASSLDANRKRGSLLSEPAIQVRRKGKGKQIWSLEKLDNRLLDMRDLYQEWKECEEDNPVIRSYFKRADPFYDEQENHSLIGVANVFLESLFYDVKLQYAVPIINQKGEVAGRLHVEVMRLSGDVGERIAGGDEVAEVSFEKETQENKLVCMVKILQATGLPQHLSHFVFCKYSFWDQQEPVIVAPEVDTSSSSVSKEPHCMVVFDHCNEFSVNITEDFIEHLSEGALAIEVYGHKINDPRKNPALWDLGIIQAKTRSLRDRWSEVTRKLEFWVQILEQNENGEYCPVEVISAKDVPTGGIFQLRQGQSRRVQVEVKSVQESGTLPLMEECILSVGIGCVKVRPLRAPRTHETFHEEEEDMDSYQDRDLERLRRKWLNALTKRQEYLDQQLQKLVSKRDKTEDDADREAQLLEMRLTLTEERNAVMVPSAGSGIPGAPAEWTPVPGMETHIPVIFLDLNADDFSSQDNLDDPEAGGWDATLTGEEEEEFFELQIVKQHDGEVKAEASWDSAVHGCPQLSRGTPVDERLFLIVRVTVQLSHPADMQLVLRKRICVNVHGRQGFAQSLLKKMSHRSSIPGCGVTFEIVSNIPEDAQGVEEREALARMAANVENPASADSEAYIEKYLRSVLAVENLLTLDRLRQEVAVKEQLTGKGKLSRRSISSPNVNRLSGSRQDLIPSYSLGSNKGRWESQQDVSQTTVSRGIAPAPALSVSPQNNHSPDPGLSNLAASYLNPVKSFVPQMPKLLKSLFPVRDEKRGKRPSPLAHQPVPRIMVQSASPDIRVTRMEEAQPEMGPDVLVQTMGAPALKICDKPAKVPSPPPVIAVTAVTPAPEAQDGPPSPLSEASSGYFSHSVSTATLSDALGPGLDAAAPPGSMPTAPEAEPEAPISHPPPPTAVPAEEPPGPQQLVSPGRERPDLEAPAPGSPFRVRRVRASELRSFSRMLAGDPGCSPGAEGNAPAPGAGGQALASDSEEADEVPEWLREGEFVTVGAHKTGVVRYVGPADFQEGTWVGVELDLPSGKNDGSIGGKQYFRCNPGYGLLVRPSRVRRATGPVRRRSTGLRLGAPEARRSATLSGSATNLASLTAALAKADRSHKNPENRKSWAS

SEQ ID NO: 248 - protein, 876 aa, Homo sapiens
MELITILEKTVSPDRLELEAAQKFLERAAVENLPTFLVELSRVLANPGNSQVARVAAGLQIKNSLTSKDPDIKAQYQQRWLAIDANARREVKNYVLQTLGTETYRPSSASQCVAGIACAEIPVNQWPELIPQLVANVTNPNSTEHMKESTLEAIGYICQDIDPEQLQDKSNEILTAIIQGMRKEEPSNNVKLAATNALLNSLEFTKANFDKESERHFIMQVVCEATQCPDTRVRVAALQNLVKIMSLYYQYMETYMGPALFAITIEAMKSDIDEVALQGIEFWSNVCDEEMDLAIEASEAAEQGRPPEHTSKFYAKGALQYLVPILTQTLTKQDENDDDDDWNPCKAAGVCLMLLATCCEDDIVPHVLPFIKEHIKNPDWRYRDAAVMAFGCILEGPEPSQLKPLVIQAMPTLIELMKDPSVVVRDTAAWTVGRICELLPEAAINDVYLAPLLQCLIEGLSAEPRVASNVCWAFSSLAEAAYEAADVADDQEEPATYCLSSSFELIVQKLLETTDRPDGHQNNLRSSAYESLMEIVKNSAKDCYPAVQKTTLVIMERLQQVLQMESHIQSTSDRIQFNDLQSLLCATLQNVLRKVQHQDALQISDVVMASLLRMFQSTAGSGGVQEDALMAVSTLVEVLGGEFLKYMEAFKPFLGIGLKNYAEYQVCLAAVGLVGDLCRALQSNIIPFCDEVMQLLLENLGNENVHRSVKPQILSVFGDIALAIGGEFKKYLEVVLNTLQQASQAQVDKSDYDMVDYLNELRESCLEAYTGIVQGLKGDQENVHPDVMLVQPRVEFILSFIDHIAGDEDHTDGVVACAAGLIGDLCTAFGKDVLKLVEARPMIHELLTEGRRSKTNKAKTLATWATKELRKLKNQA

SEQ ID NO: 249 - protein, 3695 aa, Homo sapiens
MAKRLCAGSALCVRGPRGPAPLLLVGLALLGAARAREEAGGGFSLHPPYFNLAEGARIAASATCGEEAPARGSPRPTEDLYCKLVGGPVAGGDPNQTIRGQYCDICTAANSNKAHPASNAIDGTERWWQSPPLSRGLEYNEVNVTLDLGQVFHVAYVLIKFANSPRPDLWVLERSMDFGRTYQPWQFFASSKRDCLERFGPQTLERITRDDAAICTTEYSRIVPLENGEIVVSLVNGRPGAMNFSYSPLLREFTKATNVRLRFLRTNTLLGHLMGKALRDPTVTRRYYYSIKDISIGGRCVCHGHADACDAKDPTDPFRLQCTCQHNTCGGTCDRCCPGFNQQPWKPATANSANECQSCNCYGHATDCYYDPEVDRRRASQSLDGTYQGGGVCIDCQHHTTGVNCERCLPGFYRSPNHPLDSPHVCRRCNCESDFTDGTCEDLTGRCYCRPNFSGERCDVCAEGFTGFPSCYPTPSSSNDTREQVLPAGQIVNCDCSAAGTQGNACRKDPRVGRCLCKPNFQGTHCELCAPGFYGPGCQPCQCSSPGVADDRCDPDTGQCRCRVGFEGATCDRCAPGYFHFPLCQLCGCSPAGTLPEGCDEAGRCLCQPEFAGPHCDRCRPGYHGFPNCQACTCDPRGALDQLCGAGGLCRCRPGYTGTACQECSPGFHGFPSCVPCHCSAEGSLHAACDPRSGQCSCRPRVTGLRCDTCVPGAYNFPYCEAGSCHPAGLAPVDPALPEAQVPCMCRAHVEGPSCDRCKPGFWGLSPSNPEGCTRCSCDLRGTLGGVAECQPGTGQCFCKPHVCGQACASCKDGFFGLDQADYFGCRSCRCDIGGALGQSCEPRTGVCRCRPNTQGPTCSEPARDHYLPDLHHLRLELEEAATPEGHAVRFGFNPLEFENFSWRGYAQMAPVQPRIVARLNLTSPDLFWLVFRYVNRGAMSVSGRVSVREEGRSATCANCTAQSQPVAFPPSTEPAFITVPQRGFGEPFVLNPGTWALRVEAEGVLLDYVVLLPSAYYEAALLQLRVTEACTYRPSAQQSGDNCLLYTHLPLDGFPSAAGLEALCRQDNSLPRPCPTEQLSPSHPPLITCTGSDVDVQLQVAVPQPGRYALVVEYANEDARQEVGVAVHTPQRAPQQGLLSLHPCLYSTLCRGTARDTQDHLAVFHLDSEASVRLTAEQARFFLHGVTLVPIEEFSPEFVEPRVSCISSHGAFGPNSAACLPSRFPKPPQPIILRDCQVIPLPPGLPLTHAQDLTPAMSPAGPRPRPPTAVDPDAEPTLLREPQATVVFTTHVPTLGRYAFLLHGYQPAHPTFPVEVLINAGRVWQGHANASFCPHGYGCRTLVVCEGQALLDVTHSELTVTVRVPKGRWLWLDYVLVVPENVYSFGYLREEPLDKSYDFISHCAAQGYHISPSSSSLFCRNAAASLSLFYNNGARPCGCHEVGATGPTCEPFGGQCPCHAHVIGRDCSRCATGYWGFPNCRPCDCGARLCDELTGQCICPPRTIPPDCLLCQPQTFGCHPLVGCEECNCSGPGIQELTDPTCDTDSGQCKCRPNVTGRRCDTCSPGFHGYPRCRPCDCHEAGTAPGVCDPLTGQCYCKENVQGPKCDQCSLGTFSLDAANPKGCTRCFCFGATERCRSSSYTRQEFVDMEGWVLLSTDRQVVPHERQPGTEMLRADLRHVPEAVPEAFPELYWQAPPSYLGDRVSSYGGTLRYELHSETQRGDVFVPMESRPDVVLQGNQMSITFLEPAYPTPGHVHRGQLQLVEGNFRHTETRNTVSREELMMVLASLEQLQIRALFSQISSAVFLRRVALEVASPAGQGALASNVELCLCPASYRGDSCQECAPGFYRDVKGLFLGRCVPCQCHGHSDRCLPGSGVCVDCQHNTEGAHCERCQAGFVSSRDDPSAPCVSCPCPLSVPSNNFAEGCVLRGGRTQCLCKPGYAGASCERCAPGFFGNPLVLGSSCQPCDCSGNGDPNLLFSDCDPLTGACRGCLRHTTGPRCEICAPGFYGNALLPGNCTRCDCTPCGTEACDPHSGHCLCKAGVTGRRCDRCQEGHFGFDGCGGCRPCACGPAAEGSECHPQSGQCHCRPGTMGPQCRECAPGYWGLPEQGCRRCQCPGGRCDPHTGRCNCPPGLSGERCDTCSQQHQVPVPGGPVGHSIHCEVCDHCVVLLLDDLERAGALLPAIHEQLRGINASSMAWARLHRLNASIADLQSQLRSPLGPRHETAQQLEVLEQQSTSLGQDARRLGGQAVGTRDQASQLLAGTEATLGHAKTLLAAIRAVDRTLSELMSQTGHLGLANASAPSGEQLLRTLAEVERLLWEMRARDLGAPQAAAEAELAAAQRLLARVQEQLSSLWEENQALATQTRDRLAQHEAGLMDLREALNRAVDATREAQELNSRNQERLEEALQRKQELSRDNATLQATLHAARDTLASVFRLLHSLDQAKEELERLAASLDGARTPLLQRMQTFSPAGSKLRLVEAAEAHAQQLGQLALNLSSIILDVNQDRLTQRAIEASNAYSRILQAVQAAEDAAGQALQQADHTWATVVRQGLVDRAQQLLANSTALEEAMLQEQQRLGLVWAALQGARTQLRDVRAKKDQLEAHIQAAQAMLAMDTDETSKKIAHAKAVAAEAQDTATRVQSQLQAMQENVERWQGQYEGLRGQDLGQAVLDAGHSVSTLEKTLPQLLAKLSILENRGVHNASLALSASIGRVRELIAQARGAASKVKVPMKFNGRSGVQLRTPRDLADLAAYTALKFYLQGPEPEPGQGTEDRFVMYMGSRQATGDYMGVSLRDKKVHWVYQLGEAGPAVLSIDEDIGEQFAAVSLDRTLQFGHMSVTVERQMIQETKGDTVAPGAEGLLNLRPDDFVFYVGGYPSTFTPPPLLRFPGYRGCIEMDTLNEEVVSLYNFERTFQLDTAVDRPCARSKSTGDPWLTDGSYLDGTGFARISFDSQISTTKRFEQELRLVSYSGVLFFLKQQSQFLCLAVQEGSLVLLYDFGAGLKKAVPLQPPPPLTSASKAIQVFLLGGSRKRVLVRVERATVYSVEQDNDLELADAYYLGGVPPDQLPPSLRRLFPTGGSVRGCVKGIKALGKYVDLKRLNTTGVSAGCTADLLVGRAMTFHGHGFLRLALSNVAPLTGNVYSGFGFHSAQDSALLYYRASPDGLCQVSLQQGRVSLQLLRTEVKTQAGFADGAPHYVAFYSNATGVWLYVDDQLQQMKPHRGPPPELQPQPEGPPRLLLGGLPESGTIYNFSGCISNVFVQRLLGPQRVFDLQQNLGSVNVSTGCAPALQAQTPGLGPRGLQATARKASRRSRQPARHPACMLPPHLRTTRDSYQFGGSLSSHLEFVGILARHRNWPSLSMHVLPRSSRGLLLFTARLRPGSPSLALFLSNGHFVAQMEGLGTRLRAQSRQRSRPGRWHKVSVRWEKNRILLVTDGARAWSQEGPHRQHQGAEHPQPHTLFVGGLPASSHSSKLPVTVGFSGCVKRLRLHGRPLGAPTRMAGVTPCILGPLEAGLFFPGSGGVITLDLPGATLPDVGLELEVRPLAVTGLIFHLGQARTPPYLQLQVTEKQVLLRADDGAGEFSTSVTRPSVLCDGQWHRLAVMKSGNVLRLEVDAQSNHTVGPLLAAAAGAPAPLYLGGLPEPMAVQPWPPAYCGCMRRLAVNRSPVAMTRSVEVHGAVGASGCPAA

SEQ ID NO: 250 - protein, 105 aa, Homo sapiens
MSIYFPIHCPDYLRSAKMTEVMMNTQPMEEIGLSPRKDGLSYQIFPDPSDFDRCCKLKDRLPSIVVEPTEGEVESGELRWPPEEFLVQEDEQDNCEETAKENKEQ

SEQ ID NO: 251 - protein, 860 aa, Homo sapiens [sequence omitted]

SEQ ID NO: 252 - protein, 308 aa, Homo sapiens
MDALKSAGRALIRSPSLAKQSWGGGGRHRKLPENWTDTRETLLEGMLFSLKYLGMTLVEQPKGEELSAAAIKRIVATAKASGKKLQKVTLKVSPRGIILTDNLTNQLIENVSIYRISYCTADKMHDKVFAYIAQSQHNQSLECHAFLCTKRKMAQAVTLTVAQAFKVAFEFWQVSKEEKEKRDKASQEGGDVLGARQDCTPSLKSLVATGNLLDLEETAKAPLSTVSANTTNMDEVPRPQALSGSSVVWELDDGLDEAFSRLAQSRTNPQVLDTGLTAQDMHYAQCLSPVDWDKPDSSGTEQDDLFSF

SEQ ID NO: 253 - protein, 399 aa, Homo sapiens
MPQLSGGGGGGGGDPELCATDEMIPFKDEGDPQKEKIFAEISHPEEEGDLADIKSSLVNESEIIPASNGHEVARQAQTSQEPYHDKAREHPDDGKHPDGGLYNKGPSYSSYSGYIMMPNMNNDPYMSNGSLSPPIPRTSNKVPVVQPSHAVHPLTPLITYSDEHFSPGSHPSHIPSDVNSKQGMSRHPPAPDIPTFYPLSPGGVGQITPPLGWQGQPVYPITGGFRQPYPSSLSVDTSMSRFSHHMIPGPPGPHTTGIPHPAIVTPQVKQEHPHTDSDLMHVKPQHEQRKEQEPKRPHIKKPLNAFMLYMKEMRANVVAECTLKESAAINQILGRRWHALSREEQAKYYELARKERQLHMQLYPGWSARDNYGKKKKRKREKLQESASGTGPRMTAAYI

SEQ ID NO: 254 - protein, 499 aa, Homo sapiens
MNDDPSMEENGVERVCPESLLQSREYSSLPLPRHTSSTDGTITSSDPGLEILNMASCDLDRNSLCKKEEDTRSASPTIEAQGTSPAHDNIAFQDSTSKDKTILNLEAKEEPETIEEHKKEHASGDSVVSPLPVTTVKSVNLRQSENTSANEKEVEAEFLRLSLGFKCDWFTLEKRVKLEERSRDLAEENLKKEITNCLKLLESLTPLCEDDNQAQEIIKKLEKSIKFLSQCAARVASRAEMLGAINQESRVSKAVEVMIQHVENLKRMYAKEHAELEELKQVLLQNERSFNPLEDDDDCQIKKRSASLNSKPSSLRRVTIASLPRNIGNAGMVAGMENNDRFSRRSSSWRILGSKQSEHRPSLPRFISTYSWADAEEEKCELKTKDDSEPSGEETVERTRKPSLSEKKNNPSKWDVSSVYDTIASWATNLKSSIRKANKALWLSIAFIVLFAALMSFLTGQLFQKSVDAAPTQQEDSWTSLEHILWPFTRLRHNGPPPV

SEQ ID NO: 255 - protein, 103 aa, Homo sapiens
MADKEKKKKESILDLSKYIDKTIRVKFQGGREASGILKGFDPLLNLVLDGTIEYMRDPDDQYKLTEDTRQLGLVVCRGTSVVLICPQDGMEAIPNPFIQQQDA

SEQ ID NO: 256 - protein, 1256 aa, Homo sapiens
MPGPRGAAGGLAPEMRGAGAAGLLALLLLLLLLLLGLGGRVEGGPAGERGAGGGGALARERFKVVFAPVICKRTCLKGQCRDSCQQGSNMTLIGENGHSTDTLTGSGFRVVVCPLPCMNGGQCSSRNQCLCPPDFTGRFCQVPAGGAGGGTGGSGPGLSRTGALSTGALPPLAPEGDSVASKHAIYAVQVIADPPGPGEGPPAQHAAFLVPLGPGQISAEVQAPPPVVNVRVHHPPEASVQVHRIESSNAESAAPSQHLLPHPKPSHPRPPTQKPLGRCFQDTLPKQPCGSNPLPGLTKQEDCCGSIGTAWGQSKCHKCPQLQYTGVQKPGPVRGEVGADCPQGYKRLNSTHCQDINECAMPGVCRHGDCLNNPGSYRCVCPPGHSLGPSRTQCIADKPEEKSLCFRLVSPEHQCQHPLTTRLTRQLCCCSVGKAWGARCQRCPTDGTAAFKEICPAGKGYHILTSHQTLTIQGESDFSLFLHPDGPPKPQQLPESPSQAPPPEDTEEERGVTTDSPVSEERSVQQSHPTATTTPARPYPELISRPSPPTMRWFLPDLPPSRSAVEIAPTQVTETDECRLNQNICGHGECVPGPPDYSCHCNPGYRSHPQHRYCVDVNECEAEPCGPGRGICMNTGGSYNCHCNRGYRLHVGAGGRSCVDLNECAKPHLCGDGGFCINFPGHYKCNCYPGYRLKASRPPVCEDIDECRDPSSCPDGKCENKPGSFKCIACQPGYRSQGGGACRDVNECAEGSPCSPGWCENLPGSFRCTCAQGYAPAPDGRSCLDVDECEAGDVCDNGICSNTPGSFQCQCLSGYHLSRDRSHCEDIDECDFPAACIGGDCINTNGSYRCLCPQGHRLVGGRKCQDIDECSQDPSLCLPHGACKNLQGSYVCVCDEGFTPTQDQHGCEEVEQPHHKKECYLNFDDTVFCDSVLATNVTQQECCCSLGAGWGDHCEIYPCPVYSSAEFHSLCPDGKGYTQDNNIVNYGIPAHRDIDECMLFGSEICKEGKCVNTQPGYECYCKQGFYYDGNLLECVDVDECLDESNCRNGVCENTRGGYRCACTPPAEYSPAQRQCLSPEEMERAPERRDVCWSQRGEDGMCAGPLAGPALTFDDCCCRQGRGWGAQCRPCPPRGAGSHCPTSQSESNSFWDTSPLLLGKPPRDEDSSEEDSDECRCVSGRCVPRPGGAVCECPGGFQLDASRARCVDIDECRELNQRGLLCKSERCVNTSGSFRCVCKAGFARSRPHGACVPQRRR

SEQ ID NO: 257 - protein, 153 aa, Homo sapiens
MAPAAATGGSTLPSGFSVFTTLPDLLFIFEFIFGGLVWILVASSLVPWPLVQGWVMFVSVFCFVATTTLIILYIIGAHGGETSWVTLDAAYHCTAALFYLSASVLEALATITMQDGFTYRHYHENIAAVVFSYIATLLYVVHAVFSLIRWKSS

SEQ ID NO: 258 - protein, 747 aa, Homo sapiens
MVPGSEGPARAGSVVADVVFVIEGTANLGPYFEGLRKHYLLPAIEYFNGGPPAETDFGGDYGGTQYSLVVFNTVDCAPESYVQCHAPTSSAYEFVTWLDGIKFMGGGGESCSLIAEGLSTALQLFDDFKKMREQIGQTHRVCLLICNSPPYLLPAVESTTYSGCTTENLVQQIGERGIHFSIVSPRKLPALRLLFEKAAPPALLEPLQPPTDVSQDPRHMVLVRGLVLPVGGGSAPGPLQSKQPVPLPPAAPSGATLSAAPQQPLPPVPPQYQVPGNLSAAQVAAQNAVEAAKNQKAGLGPRFSPITPLQQAAPGVGPPFSQAPAPQLPPGPPGAPKPPPASQPSLVSTVAPGSGLAPTAQPGAPSMAGTVAPGGVSGPSPAQLGAPALGGQQSVSNKLLAWSGVLEWQEKPKPASVDANTKLTRSLPCQVYVNHGENLKTEQWPQKLIMQLIPQQLLTTLGPLFRNSRMVQFHFTNKDLESLKGLYRIMGNGFAGCVHFPHTAPCEVRVLMLLYSSKKKIFMGLIPYDQSGFVNGIRQVITNHKQVQQQKLEQQQRGMGGQQAPPGLGPILEDQARPSQNLLQLRPPQPQPQGTVGASGATGQPQPQGTAQPPPGAPQGPPGAASGPPPPGPILRPQNPGANPQLRSLLLNPPPPQTGVPPPQASLHHLQPPGAPALLPPPHQGLGQPQLGPPLLHPPPAQSWPAQLPPRAPLPGQMLLSGGPRGPVPQPGLQPSVMEDDILMDLI

SEQ ID NO: 259 - protein, 90 aa, Homo sapiens
MRDPVSSQYSSFLFWRMPIPELDLSELEGLGLSDTATYKVKDSSVGKMIGQATAADQEKNPEGDGLLEYSTFNFWRAPIASIHSFELDLL

SEQ ID NO: 260 - protein, 258 aa, Homo sapiens
MAASVLNTVLRRLPMLSLFRGSHRVQVPLQTLCTKAPSEEDSLSSVPISPYKDEPWKYLESEEYQERYGSRPVWADYRRNHKGGVPPQRTRKTCIRRNKVVGNPCPICRDHKLHVDFRNVKLLEQFVCAHTGIIFYAPYTGVCVKQHKRLTQAIQKARDHGLLIYHIPQVEPRDLDFSTSHGAVSATPPAPTLVSGDPWYPWYNWKQPPERELSRLRRLYQGHLQEESGPPPESMPKMPPRTPAEASSTGQTGPQSAL

SEQ ID NO: 261 - protein, 734 aa, Homo sapiens
MRPAVLGSPDRAPPEDEGPVMVKLEDSEEEGEAALWDPGPEAARLRFRCFRYEEATGPQEALAQLRELCRQWLRPEVRSKEQMLELLVLEQFLGALPPEIQARVQGQRPGSPEEAAALVDGLRREPGGPRRWVTVQVQGQEVLSEKMEPSSFQPLPETEPPTPEPGPKTPPRTMQESPLGLQVKEESEVTEDSDFLESGPLAATQESVPTLLPEEAQRCGTVLDQIFPHSKTGPEGPSWREHPRALWHEEAGGIFSPGFALQLGSISAGPGSVSPHLHVPWDLGMAGLSGQIQSPSREGGFAHALLLPSDLRSEQDPTDEDPCRGVGPALITTRWRSPRGRSRGRPSTGGGVVRGGRCDVCGKVFSQRSNLLRHQKIHTGERPFVCSECGRSFSRSSHLLRHQLTHTEERPFVCGDCGQGFVRSARLEEHRRVHTGEQPFRCAECGQSFRQRSNLLQHQRIHGDPPGPGAKPPAPPGAPEPPGPFPCSECRESFARRAVLLEHQAVHTGDKSFGCVECGERFGRRSVLLQHRRVHSGERPFACAECGQSFRQRSNLTQHRRIHTGERPFACAECGKAFRQRPTLTQHLRVHTGEKPFACPECGQRFSQRLKLTRHQRTHTGEKPYHCGECGLGFTQVSRLTEHQRIHTGERPFACPECGQSFRQHANLTQHRRIHTGERPYACPECGKAFRQRPTLTQHLRTHRREKPFACQDCGRRFHQSTKLIQHQRVHSAE

SEQ ID NO: 262 - protein, 740 aa, Homo sapiens
MQWTKVLGLGLGAAALLGLGIILGHFAIPKKANSLAPQDLDLEILETVMGQLDAHRIRENLRELSREPHLASSPRDEDLVQLLLQRWKDPESGLDSAEASTYEVLLSFPSQEQPNVVDIVGPTGGIIHSCHRTEENVTGEQGGPDVVQPYAAYAPSGTPQGLLVYANRGAEEDFKELQTQGIKLEGTIALTRYGGVGRGAKAVNAAKHGVAGVLVYTDPADINDGLSSPDETFPNSWYLPPSGVERGSYYEYFGDPLTPYLPAVPSSFRVDLANVSGFPPIPTQPIGFQDARDLLCNLNGTLAPATWQGALGCHYRLGPGFRPDGDFPADSQVNVSVYNRLELRNSSNVLGIIRGAVEPDRYVLYGNHRDSWVHGAVDPSSGTAVLLELSRVLGTLLKKGTWRPRRSIVFASWGAEEFGLIGSTEFTEEFFNKLQERTVAYINVDISVFANATLRVQGTPPVQSVVFSATKEIRSPGPGDLSIYDNWIRYFNRSSPVYGLVPSLGSLGAGSDYAPFVHFLGISSMDIAYTYDRSKTSARIYPTYHTAFDTFDYVDKFLDPGFSSHQAVARTAGSVILRLSDSFFLPLKVSDYSETLRSFLQAAQQDLGALLEQHSISLGPLVTAVEKFEAEAAALGQRISTLQKGSPDPLQVRMLNDQLMLLERTFLNPRAFPEERYYSHVLWAPRTGSVVTFPGLSNACSRARDTASGSEAWAEVQRQLSIVVTALEGAAATLRPVADL

SEQ ID NO: 263 - protein, 215 aa, Homo sapiens
MPGEATETVPATEQELPQPQAETGSGTESDSDESVPELEEQDSTQATTQQAQLAAAAEIDEEPVSKAKQSRSEKKARKAMSKLGLRQVTGVTRVTIRKSKNILFVITKPDVYKSPASDTYIVFGEAKIEDLSQQAQLAAAEKFKVQGEAVSNIQENTQTPTVQEESEEEEVDETGVEVKDIELVMSQANVSRAKAVRALKNNSNDIVNAIMELTM

SEQ ID NO: 264 - protein, 391 aa, Homo sapiens
MADIDNKEQSELDQDLDDVEEVEEEETGEETKLKARQLTVQMMQNPQILAALQERLDGLVETPTGYIESLPRVVKRRVNALKNLQVKCAQIEAKFYEEVHDLERKYAVLYQPLFDKRFEIINAIYEPTEEECEWKPDEEDEISEELKEKAKIEDEKKDEEKEDPKGIPEFWLTVFKNVDLLSDMVQEHDEPILKHLKDIKVKFSDAGQPMSFVLEFHFEPNEYFTNEVLTKTYRMRSEPDDSDPFSFDGPEIMGCTGCQIDWKKGKNVTLKTIKKKQKHKGRGTVRTVTKTVSNDSFFNFFAPPEVPESGDLDDDAEAILAADFEIGHFLRERIIPRSVLYFTGEAIEDDDDDYDEEGEEADEEGEEEGDEENDPDYDPKKDQNPAECKQQ

SEQ ID NO: 265 - protein, 263 aa, Homo sapiens
MEESGYESVLCVKPDVHVYRIPPRATNRGYRAAEWQLDQPSWSGRLRITAKGQMAYIKLEDRTSGELFAQAPVDQFPGTAVESVTDSSRYFVIRIEDGNGRRAFIGIGFGDRGDAFDFNVALQDHFKWVKQQCEFAKQAQNPDQGPKLDLGFKEGQTIKLNIANMKKKEGAAGNPRVRPASTGGLSLLPPPPGGKTSTLIPPPGEQLAVGGSLVQPAVAPSSGGAPVPWPQPNPATADIWGDFTKSTGSTSSQTQPGTGWVQF

SEQ ID NO: 266 - protein, 542 aa, Homo sapiens
MVAHDETGGLLPIKRTIRVLDVNNQSFREQEEPSNKRVRPLARVTSLANLISPVRNGAVRRFGQTIQSFTLRGDHRSPASAQKFSSRSTVPTPAKRRSSALWSEMLDITMKESLTTREIRRQEAIYEMSRGEQDLIEDLKLARKAYHDPMLKLSIMSEEELTHIFGDLDSYIPLHEDLLTRIGEATKPDGTVEQIGHILVSWLPRLNAYRGYCSNQLAAKALLDQKKQDPRVQDFLQRCLESPFSRKLDLWSFLDIPRSRLVKYPLLLKEILKHTPKEHPDVQLLEDAILIIQGVLSDINLKKGESECQYYIDKLEYLDEKQRDPRIEASKVLLCHGELRSKSGHKLYIFLFQDILVLTRPVTRNERHSYQVYRQPIPVQELVLEDLQDGDVRMGGSFRGAFSNSEKAKNIFRIRFHDPSPAQSHTLQANDVFHKQQWFNCIRAAIAPFQSAGSPPELQGLPELHEECEGNHPSARKLTAQRRASTVSSVTQVEVDENAYRCGSGMQMAEDSKSLKTHQTQPGIRRARDKALSGGKRKETLV

SEQ ID NO: 267 - protein, 111 aa, Homo sapiens
MANIHQENEEMEQPMQNGEEDRPLGGGEGHQPAGNRRGQARRLAPNFRWAIPNRQINDGMGGDGDDMEIFMEEMREIRRKLRELQLRNCLRILMGELSNHHDHHDEFCLMP

SEQ ID NO: 268 - protein, 165 aa, Homo sapiens
MELCRSLALLGGSLGLMFCLIALSTDFWFEAVGPTHSAHSGLWPTGHGDIISGYIHVTQTFSIMAVLWALVSVSFLVLSCFPSLFPPGHGPLVSTTAAFAAAISMVVAMAVYTSERWDQPPHPQIQTFFSWSFYLGWVSAILLLCTGALSLGAHCGGPRPGYETL

SEQ ID NO: 269 - protein, 301 aa, Homo sapiens
MTRHGKNCTAGAVYTYHEKKKDTAASGYGTQNIRLSRDAVKDFDCCCLSLQPCHDPVVTPDGYLYEREAILEYILHQKKEIARQMKAYEKQRGTRREEQKELQRAASQDHVRGFLEKESAIVSRPLNPFTAKALSGTSPDDVQPGPSVGPPSKDKDKVLPSFWIPSLTPEAKATKLEKPSRTVTCPMSGKPLRMSDLTPVHFTPLDSSVDRVGLITRSERYVCAVTRDSLSNATPCAVLRPSGAVVTLECVEKLIRKDMVDPVTGDKLTDRDIIVLQRGGTGFAGSGVKLQAEKSRPVMQA

SEQ ID NO: 270 - protein, 514 aa, Homo sapiens
MALMQELYSTPASRLDSFVAQWLQPHREWKEEVLDAVRTVEEFLRQEHFQGKRGLDQDVRVLKVVKVGSFGNGTVLRSTREVELVAFLSCFHSFQEAAKHHKDVLRLIWKTMWQSQDLLDLGLEDLRMEQRVPDALVFTIQTRGTAEPITVTIVPAYRALGPSLPNSQPPPEVYVSLIKACGGPGNFCPSFSELQRNFVKHRPTKLKSLLRLVKHWYQQYVKARSPRANLPPLYALELLTIYAWEMGTEEDENFMLDEGFTTVMDLLLEYEVICIYWTKYYTLHNAIIEDCVRKQLKKERPIILDPADPTLNVAEGYRWDIVAQRASQCLKQDCCYDNRENPISSWNVKRARDIHLTVEQRGYPDFNLIVNPYEPIRKVKEKIRRTRGYSGLQRLSFQVPGSERQLLSSRCSLAKYGIFSHTHIYLLETIPSEIQVFVKNPDGGSYAYAINPNSFILGLKQQIEDQQGLPKKQQQLEFQGQVLQDWLGLGIYGIQDSDTLILSKKKGEALFPAS

SEQ ID NO: 271 - protein, 644 aa, Homo sapiens
MNAAASSYPMASLYVGDLHSDVTEAMLYEKFSPAGPVLSIRVCRDMITRRSLGYAYVNFQQPADAERALDTMNFDVIKGKPIRIMWSQRDPSLRKSGVGNVFIKNLDKSIDNKALYDTFSAFGNILSCKVVCDENGSKGYAFVHFETQEAADKAIEKMNGMLLNDRKVFVGRFKSRKEREAELGAKAKEFTNVYIKNFGEEVDDESLKELFSQFGKTLSVKVMRDPNGKSKGFGFVSYEKHEDANKAVEEMNGKEISGKIIFVGRAQKKVERQAELKRKFEQLKQERISRYQGVNLYIKNLDDTIDDEKLRKEFSPFGSITSAKVMLEDGRSKGFGFVCFSSPEEATKAVTEMNGRIVGSKPLYVALAQRKEERKAHLTNQYMQRVAGMRALPANAILNQFQPAAGGYFVPAVPQAQGRPPYYTPNQLAQMRPNPRWQQGGRPQGFQGMPSAIRQSGPRPTLRHLAPTGSECPDRLAMDFGGAGAAQQGLTDSCQSGGVPTAVQNLAPRAAVAAAAPRAVAPYKYASSVRSPHPAIQPLQAPQPAVHVQGQEPLTASMLAAAPPQEQKQMLGERLFPLIQTMHSNLAGKITGMLLEIDNSELLHMLESPESLRSKVDEAVAVLQAHHAKKEAAQKVGAVAAATS

SEQ ID NO: 272 - protein, 533 aa, Homo sapiens
MAPKPKPWVQTEGPEKKKGRQAGREEDPFRSTAEALKAIPAEKRIIRVDPTCPLSSNPGTQVYEDYNCTLNQTNIENNNNKFYIIQLLQDSNRFFTCWNRWGRVGEVGQSKINHFTRLEDAKKDFEKKFREKTKNNWAERDHFVSHPGKYTLIEVQAEDEAQEAVVKVDRGPVRTVTKRVQPCSLDPATQKLITNIFSKEMFKNTMALMDLDVKKMPLGKLSKQQIARGFEALEALEEALKGPTDGGQSLEELSSHFYTVIPHNFGHSQPPPINSPELLQAKKDMLLVLADIELAQALQAVSEQEKTVEEVPHPLDRDYQLLKCQLQLLDSGAPEYKVIQTYLEQTGSNHRCPTLQHIWKVNQEGEEDRFQAHSKLGNRKLLWHGTNMAVVAAILTSGLRIMPHSGGRVGKGIYFASENSKSAGYVIGMKCGAHHVGYMFLGEVALGREHHINTDNPSLKSPPPGFDSVIARGHTEPDPTQDTELELDGQQVVVPQGQPVPCPEFSSSTFSQSEYLIYQESQCRLRYLLEVHL

SEQ ID NO: 273 - protein, 259 aa, Homo sapiens
MDAWVRFSAQSQARERLCRAAQYACSLLGHALQRHGASPELQKQIRQLESHLSLGRKLLRLGNSADALESAKRAVHLSDVVLRFCITVSHLNRALYFACDNVLWAGKSGLAPRVDQEKWAQRSFRYYLFSLIMNLSRDAYEIRLLMEQESSACSRRLKGSGGGVPGGSETGGLGGPGTPGGGLPQLALKLRLQVLLLARVLRGHPPLLLDVVRNACDLFIPLDKLGLWRCGPGIVGLCGLVSSILSILTLIYPWLRLKP

SEQ ID NO: 274 - protein, 780 aa, Homo sapiens
MAAVDLEKLRASGAGKAIGVLTSGGDAQGMNAAVRAVTRMGIYVGAKVFLIYEGYEGLVEGGENIKQANWLSVSNIIQLGGTIIGSARCKAFTTREGRRAAAYNLVQHGITNLCVIGGDGSLTGANIFRSEWGSLLEELVAEGKISETTARTYSHLNIAGLVGSIDNDFCGTDMTIGTDSALHRIMEVIDAITTTAQSHQRTFVLEVMGRHCGYLALVSALASGADWLFIPEAPPEDGWENFMCERLGETRSRGSRLNIIIIAEGAIDRNGKPISSSYVKDLVVQRLGFDTRVTVLGHVQRGGTPSAFDRILSSKMGMEAVMALLEATPDTPACVVTLSGNQSVRLPLMECVQMTKEVQKAMDDKRFDEATQLRGGSFENNWNIYKLLAHQKPPKEKSNFSLAILNVGAPAAGMNAAVRSAVRTGISHGHTVYVVHDGFEGLAKGQVQEVGWHDVAGWLGRGGSMLGTKRTLPKGQLESIVENIRIYGIHALLVVGGFEAYEGVLQLVEARGRYEELCIVMCVIPATISNNVPGTDFSLGSDTAVNAAMESCDRIKQSASGTKRRVFIVETMGGYCGYLATVTGIAVGADAAYVFEDPFNIHDLKVNVEHMTEKMKTDIQRGLVLRNEKCHDYYTTEFLYNLYSSEGKGVFDCRTNVLGHLQQGGAPTPFDRNYGTKLGVKAMLWLSEKLREVYRKGRVFANAPDSACVIGLKKKAVAFSPVTELKKDTDFEHRMPREQWWLSLRLMLKMLAQYRISMAAYVSGELEHVTRRTLSMDKGF

SEQ ID NO: 275 - protein, 784 aa, Homo sapiens
MDADDSRAPKGSLRKFLEHLSGAGKAIGVLTSGGDAQGMNAAVRAVVRMGIYVGAKVYFIYEGYQGMVDGGSNIAEADWESVSSILQVGGTIIGSARCQAFRTREGRLKAACNLLQRGITNLCVIGGDGSLTGANLFRKEWSGLLEELARNGQIDKEAVQKYAYLNVVGMVGSIDNDFCGTDMTIGTDSALHRIIEVVDAIMTTAQSHQRTFVLEVMGRHCGYLALVSALACGADWVFLPESPPEEGWEEQMCVKLSENRARKKRLNIIIVAEGAIDTQNKPITSEKIKELVVTQLGYDTRVTILGHVQRGGTPSAFDRILASRMGVEAVIALLEATPDTPACVVSLNGNHAVRLPLMECVQMTQDVQKAMDERRFQDAVRLRGRSFAGNLNTYKRLAIKLPDDQIPKTNCNVAVINVGAPAAGMNAAVRSAVRVGIADGHRMLAIYDGFDGFAKGQIKEIGWTDVGGWTGQGGSILGTKRVLPGKYLEEIATQMRTHSINALLIIGGFEAYLGLLELSAAREKHEEFCVPMVMVPATVSNNVPGSDFSIGADTALNTITDTCDRIKQSASGTKRRVFIIETMGGYCGYLANMGGLAAGADAAYIFEEPFDIRDLQSNVEHLTEKMKTTIQRGLVLRNESCSENYTTDFIYQLYSEEGKGVFDCRKNVLGHMQQGGAPSPFDRNFGTKISARAMEWITAKLKEARGRGKKFTTDDSICVLGISKRNVIFQPVAELKKQTDFEHRIPKEQWWLKLRPLMKILAKYKASYDVSDSGQLEHVQPWSV

SEQ ID NO: 276 - protein, 299 aa, Homo sapiens
MAQNLKDLAGRLPAGPRGMGTALKLLLGAGAVAYGVRESVFTVEGGHRAIFFNRIGGVQQDTILAEGLHFRIPWFQYPIIYDIRARPRKISSPTGSKDLQMVNISLRVLSRPNAQELPSMYQRLGLDYEERVLPSIVNEVLKSVVAKFNASQLITQRAQVSLLIRRELTERAKDFSLILDDVAITELSFSREYTAAVEAKQVAQQEAQRAQFLVEKAKQEQRQKIVQAEGEAEAAKMLGEALSKNPGYIKLRKIRAAQNISKTIATSQNRIYLTADNLVLNLQDESFTRGSDSLIKGKK

SEQ ID NO: 277 - protein, 263 aa, Homo sapiens
MLLAWVQAFLVSNMLLAEAYGSGGCFWDNGHLYREDQTSPAPGLRCLNWLDAQSGLASAPVSGAGNHSYCRNPDEDPRGPWCYVSGEAGVPEKRPCEDLRCPETTSQALPAFTTEIQEASEGPGADEVQVFAPANALPARSEAAAVQPVIGISQRVRMNSKEKKDLGTLGYVLGITMMVIIIAIGAGIILGYSYKRGKDLKEQHDQKVCEREMQRITLPLSAFTNPTCEIVDEKTVVVHTSQTPVDPQEGTTPLMGQAGTPGA

SEQ ID NO: 278 - protein, 243 aa, Homo sapiens
MSPAAPVPPDSALESPFEEMALVRGGWLWRQSSILRRWKRNWFALWLDGTLGYYHDETAQDEEDRVLIHFNVRDIKIGPECHDVQPPEGRSRDGLLTVNLREGGRLHLCAETKDDALAWKTALLEANSTPAPAGATVPPRSRRVCSKVRCVTRSWSPCKVERRIWVRVYSPYQDYYEVVPPNAHEATYVRSYYGPPYAGPGVTHVIVREDPCYSAGAPLAMGMLAGAATGAALGSLMWSPCWF

SEQ ID NO: 279 - protein, 163 aa, Homo sapiens
MVRFKHRYLLCELVSDDPRCRLSLDDRVLSSLVRDTIARVHGTFGAAACSIGFAVRYLNAYTGIVLLRCRKEFYQLVWSALPFITYLENKGHRYPCFFNTLHVGGTIRTCQKFLIQYNRRQLLILLQNCTDEGEREAIQKSVTRSCLLEEEEESGEEAAEAME

SEQ ID NO: 280 - protein, 509 aa, Homo sapiens
MLLSLPALHLQTSEHHPFFQLPHRRLGPWCSPTGSPAPLSCETGCGEGSWILVCRLLVPTQVSLLSMEEDIDTRKINNSFLRDHSYATEADIISTVEFNHTGELLATGDKGGRVVIFQREQESKNQVHRRGEYNVYSTFQSHEPEFDYLKSLEIEEKINKIRWLPQQNAAYFLLSTNDKTVKLWKVSERDKRPEGYNLKDEEGRLRDPATITTLRVPVLRPMDLMVEATPRRVFANAHTYHINSISVNSDYETYMSADDLRINLWNFEITNQSFNIVDIKPANMEELTEVITAAEFHPHHCNTFVYSSSKGTIRLCDMRASALCDRHTKFFEEPEDPSNRSFFSEIISSISDVKFSHSGRYIMTRDYLTVKVWDLNMENRPIETYQVHDYLRSKLCSLYENDCIFDKFECVWNGSDSVIMTGSYNNFFRMFDRNTKRDVTLEASRENSKPRAILKPRKVCVGGKRRKDEISVDSLDFSKKILHTAWHPSENIIAVAATNNLYIFQDKVN

SEQ ID NO: 281 - protein, 825 aa, Homo sapiens
MLDICLEKRVGTTLAAPKCNSSTVRFQGLAEGTKGTMKMDMEDADMTLWTEAEFEEKCTYIVNDHPWDSGADGGTSVQAEASLPRNLLFKYATNSEEVIGVMSKEYIPKGTRFGPLIGEIYTNDTVPKNANRKYFWRIYSRGELHHFIDGFNEEKSNWMRYVNPAHSPREQNLAACQNGMNIYFYTIKPIPANQELLVWYCRDFAERLHYPYPGELTMMNLTQTQSSLKQPSTEKNELCPKNVPKREYSVKEILKLDSNPSKGKDLYRSNISPLTSEKDLDDFRRRGSPEMPFYPRVVYPIRAPLPEDFLKASLAYGIERPTYITRSPIPSSTTPSPSARSSPDQSLKSSSPHSSPGNTVSPVGPGSQEHRDSYAYLNASYGTEGLGSYPGYAPLPHLPPAFIPSYNAHYPKFLLPPYGMNCNGLSAVSSMNGINNFGLFPRLCPVYSNLLGGGSLPHPMLNPTSLPSSLPSDGARRLLQPEHPREVLVPAPHSAFSFTGAAASMKDKACSPTSGSPTAGTAATAEHVVQPKATSAAMAAPSSDEAMNLIKNKRNMTGYKTLPYPLKKQNGKIKYECNVCAKTFGQLSNLKVHLRVHSGERPFKCQTCNKGFTQLAHLQKHYLVHTGEKPHECQVCHKRFSSTSNLKTHLRLHSGEKPYQCKVCPAKFTQFVHLKLHKRLHTRERPHKCSQCHKNYIHLCSLKVHLKGNCAAAPAPGLPLEDLTRINEEIEKFDISDNADRLEDVEDDISVISVVEKEILAVVRKEKEETGLKVSLQRNMGNGLLSSGCSLYESSDLPLMKLPPSNPLPLVPVKVKQETVEPMDP

SEQ ID NO: 282 - protein, 878 aa, Homo sapiens
MATAPSYPAGLPGSPGPGSPPPPGGLELQSPPPLLPQIPAPGSGVSFHIQIGLTREFVLLPAASELAHVKQLACSIVDQKFPECGFYGLYDKILLFKHDPTSANLLQLVRSSGDIQEGDLVEVVLSASATFEDFQIRPHALTVHSYRAPAFCDHCGEMLFGLVRQGLKCDGCGLNYHKRCAFSIPNNCSGARKRRLSSTSLASGHSVRLGTSESLPCTAEELSRSTTELLPRRPPSSSSSSSASSYTGRPIELDKMLLSKVKVPHTFLIHSYTRPTVCQACKKLLKGLFRQGLQCKDCKFNCHKRCATRVPNDCLGEALINGDVPMEEATDFSEADKSALMDESEDSGVIPGSHSENALHASEEEEGEGGKAQSSLGYIPLMRVVQSVRHTTRKSSTTLREGWVVHYSNKDTLRKRHYWRLDCKCITLFQNNTTNRYYKEIPLSEILTVESAQNFSLVPPGTNPHCFEIVTANATYFVGEMPGGTPGGPSGQGAEAARGWETAIRQALMPVILQDAPSAPGHAPHRQASLSISVSNSQIQENVDIATVYQIFPDEVLGSGQFGVVYGGKHRKTGRDVAVKVIDKLRFPTKQESQLRNEVAILQSLRHPGIVNLECMFETPEKVFVVMEKLHGDMLEMILSSEKGRLPERLTKFLITQILVALRHLHFKNIVHCDLKPENVLLASADPFPQVKLCDFGFARIIGEKSFRRSVVGTPAYLAPEVLLNQGYNRSLDMWSVGVIMYVSLSGTFPFNEDEDINDQIQNAAFMYPASPWSHISAGAIDLINNLLQVKMRKRYSVDKSLSHPWLQEYQTWLDLRELEGKMGERYITHESDDARWEQFAAEHPLPGSGLPTDRDLGGACPPQDHDMQGLAERISVL

SEQ ID NO: 283 - protein, 416 aa, Homo sapiens
MVRPRRAPYRSGAGGPLGGRGRPPRPLVVRAVRSRSWPASPRGPQPPRIRARSAPPMEGARVFGALGPIGPSSPGLTLGGLAVSEHRLSNKLLAWSGVLEWQEKRRPYSDSTAKLKRTLPCQAYVNQGENLETDQWPQKLIMQLIPQQLLTTLGPLFRNSQLAQFHFTNRDCDSLKGLCRIMGNGFAGCMLFPHISPCEVRVLMLLYSSKKKIFMGLIPYDQSGFVSAIRQVITTRKQAVGPGGVNSGPVQIVNNKFLAWSGVMEWQEPRPEPNSRSKRWLPSHVYVNQGEILRTEQWPRKLYMQLIPQQLLTTLVPLFRNSRLVQFHFTKDLETLKSLCRIMDNGFAGCVHFSYKASCEIRVLMLLYSSEKKIFIGLIPHDQGNFVNGIRRVIANQQQVLQRNLEQEQQQRGMGG

SEQ ID NO: 284 - protein, 557 aa, Homo sapiens
MDDLDALLADLESTTSHISKRPVFLSEETPYSYPTGNHTYQEIAVPPPVPPPPSSEALNGTILDPLDQWQPSSSRFIHQQPQSSSPVYGSSAKTSSVSNPQDSVGSPCSRVGEEEHVYSFPNKQKSAEPSPTVMSTSLGSNLSELDRLLLELNAVQHNPPGFPADEANSSPPLPGALSPLYGVPETNSPLGGKAGPLTKEKPKRNGGRGLEDVRPSVESLLDELESSVPSPVPAITVNQGEMSSPQRVTSTQQQTRISASSATRELDELMASLSDFKFMAQGKTGSSSPPGGPPKPGSQLDSMLGSLQSDLNKLGVATVAKGVCGACKKPIAGQVVTAMGKTWHPEHFVCTHCQEEIGSRNFFERDGQPYCEKDYHNLFSPRCYYCNGPILDKVVTALDRTWHPEHFFCAQCGAFFGPEGFHEKDGKAYCRKDYFDMFAPKCGGCARAILENYISALNTLWHPECFVCRECFTPFVNGSFFEHDGQPYCEVHYHERRGSLCSGCQKPITGRCITAMAKKFHPEHFVCAFCLKQLNKGTFKEQNDKPYCQNCFLKLFC

SEQ ID NO: 285 - protein, 981 aa, Homo sapiens
MAADSEPESEVFEITDFTTASEWERFISKVEEVLNDWKLIGNSLGKPLEKGIFTSGTWEEKSDEISFADFKFSVTHHYLVQESTDKEGKDELLEDVVPQSMQDLLGMNNDFPPRAHCLVRWYGLREFVVIAPAAHSDAVLSESKCNLLLSSVSIALGNTGCQVPLFVQIHHKWRRMYVGECQGPGVRTDFEMVHLRKVPNQYTHLSGLLDIFKSKIGCPLTPLPPVSIAIRFTYVLQDWQQYFWPQQPPDIDALVGGEVGGLEFGKLPFGACEDPISELHLATTWPHLTEGIIVDNDVYSDLDPIQAPHWSVRVRKAENPQCLLGDFVTEFFKICRRKESTDEILGRSAFEEEGKETADITHALSKLTEPASVPIHKLSVSNMVHTAKKKIRKHRGVEESPLNNDVLNTILLFLFPDAVSEKPLDGTTSTDNNNPPSESEDYNLYNQFKSAPSDSLTYKLALCLCMINFYHGGLKGVAHLWQEFVLEMRFRWENNFLIPGLASGPPDLRCCLLHQKLQMLNCCIERKKARDEGKKTSASDVTNIYPGDAGKAGDQLVPDNLKETDKEKGEVGKSWDSWSDSEEEFFECLSDTEELKGNGQESGKKGGPKEMANLRPEGRLYQHGKLTLLHNGEPLYIPVTQEPAPMTEDLLEEQSEVLAKLGTSAEGAHLRARMQSACLLSDMESFKAANPGCSLEDFVRWYSPRDYIEEEVIDEKGNVVLKGELSARMKIPSNMWVEAWETAKPIPARRQRRLFDDTREAEKVLHYLAIQKPADLARHLLPCVIHAAVLKVKEEESLENISSVKKIIKQIISHSSKVLHFPNPEDKKLEEIIHQITNVEALIARARSLKAKFGTEKCEQEEEKEDLERFVSCLLEQPEVLVTGAGRGHAGRIIHKLFVNAQRAAAMTPPEEELKRMGSPEERRQNSVSDFPPPAGREFILRTTVPRPAPYSKALPQRMYSVLTKEDFRLAGAFSSDTSFF

SEQ ID NO: 286 - protein, 815 aa, Homo sapiens
MEVRASLQKVSGSSDSVATMNSEEFVLVPQYADDNSTKHEEKPQLKIVSNGDEQLEKAMEEILRDSEKRPSSLLVDCQSSSEISDHSFGDIPASQTNKPSLQLILDPSNTEISTPRPSSPGGLPEEDSVLFNKLTYLGCMKVSSPRNEVEALRAMATMKSSSQYPFPVTLYVPNVPEGSVRIIDQSSNVEIASFPIYKVLFCARGHDGTTESNCFAFTESSHGSEEFQIHVFSCEIKEAVSRILYSFCTAFKRSSRQVSDVKDSVIPTPDSDVFTFSVSLEVKEDDGKGNFSPVPKDRDKFYFKLKQGIEKKVVITVQQLSNKELAIERCFGMLLSPGRNVKNSDMHLLDMESMGKSYDGRAYVITGMWNPNAPVFLALNEETPKDKQVYMTVAVDMVVTEVVEPVRFLLETVVRVYPANERFWYFSRKTFTETFFMRLKQSEGKGHTNAGDAIYEVVSLQRESDKEEPVTPTSGGGPMSPQDDEAEEESDNELSSGTGDVSKDCPEKILYSWGELLGKWHSNLGARPKGLSTLVKSGVPEALRAEVWQLLAGCHDNQAMLDRYRILITKDSAQESVITRDIHRTFPAHDYFKDTGGDGQESLYKICKAYSVYDEDIGYCQGQSFLAAVLLLHMPEEQAFCVLVKIMYDYGLRDLYRNNFEDLHCKFYQLERLMQEQLPDLHSHFSDLNLEAHMYASQWFLTLFTAKFPLCMVFHIIDLLLCEGLNIIFHVALALLKTSKEDLLQADFEGALKFFRVQLPKRYRAEENARRLMEQACNIKVPTKKLKKYEKEYQTMRESQLQQEDPMDRYKFVYL

SEQ ID NO: 287 - protein, 206 aa, Homo sapiens
MAANKPKGQNSLALHKVIMVGSGGVGKSALTLQFMYDEFVEDYEPTKADSYRKKVVLDGEEVQIDILDTAGQEDYAAIRDNYFRSGEGFLCVFSITEMESFAATADFREQILRVKEDENVPFLLVGNKSDLEDKRQVSVEEAKNRAEQWNVNYVETSAKTRANVDKVFFDLMREIRARKMEDSKEKNGKKKRKSLAKRIRERCCIL

SEQ ID NO: 288 - protein, 164 aa, Homo sapiens
MASPHQEPKPGDLIEIFRLGYEHWALYIGDGYVIHLAPPSEYPGAGSSSVFSVLSNSAEVKRERLEDVVGGCCYRVNNSLDHEYQPRPVEVIISSAKEMVGQKMKYSIVSRNCEHFVTQLRYGKSRCKQVEKAKVEVGVATALGILVVAGCSFAIRRYQKKATA

SEQ ID NO: 289 - protein, 401 aa, Homo sapiens
MSLYDDLGVETSDSKTEGWSKNFKLLQSQLQVKKAALTQAKSQRTKQSTVLAPVIDLKRGGSSDDRQIVDTPPHVAAGLKDPVPSGFSAGEVLIPLADEYDPMFPNDYEKVVKRQREERQRQRELERQKEIEEREKRRKDRHEASGFARRPDPDSDEDEDYERERRKRSMGGAAIAPPTSLVEKDKELPRDFPYEEDSRPRSQSSKAAIPPPVYEEQDRPRSPTGPSNSFLANMGGTVAHKIMQKYGFREGQGLGKHEQGLSTALSVEKTSKRGGKIIVGDATEKDASKKSDSNPLTEILKCPTKVVLLRNMVGAGEVDEDLEVETKEECEKYGKVGKCVIFEIPGAPDDEAVRIFLEFERVESAIKAVVDLNGRYFGGRVVKACFYNLDKFRVLDLAEQV

SEQ ID NO: 290 - protein, 359 aa, Homo sapiens
MVKLFIGNLPREATEQEIRSLFEQYGKVLECDIIKNYGFVHIEDKTAAEDAIRNLHHYKLHGVNINVEASKNKSKASTKLHVGNISPTCTNQELRAKFEEYGPVIECDIVKDYAFVHMERAEDAVEAIRGLDNTEFQGKRMHVQLSTSRLRTAPGMGDQSGCYRCGKEGHWSKECPVDRTGRVADFTEQYNEQYGAVRTPYTMGYGESMYYNDAYGALDYYKRYRVRSYEAVAAAAAASAYNYAEQTMSHLPQVQSTTVTSHLNSTSVDPYDRHLLPNSGAAATSAAMAAAAATTSSYYGRDRSPLRRAAAMLPTVGEGYGYGPESELSQASAATRNSLYDMARYEREQYVDRARYSAF

SEQ ID NO: 291 - protein, 547 aa, Homo sapiens
MFYYPNVLQRHTGCFATIWLAATRGSRLVKREYLRVNVVKTCEEILNYVLVRVQPPQPGLPRPRFSLYLSAQLQIGVIRVYSQQCQYLVEDIQHILERLHRAQLQIRIDMETELPSLLLPNHLAMMETLEDAPDPFFGMMSVDPRLPSPFDIPQIRHLLEAAIPERVEEIPPEVPTEPREPERIPVTVLPPEAITILEAEPIRMLEIEGERELPEVSRRELDLLIAEEEEAILLEIPRLPPPAPAEVEGIGEALGPEELRLTGWEPGALLMEVTPPEELRLPAPPSPERRPPVPPPPRRRRRRRLLFWDKETQISPEKFQEQLQTRAHCWECPMVQPPERTIRGPAELFRTPTLSGWLPPELLGLWTHCAQPPPKALRRELPEEAAAEEERRKIEVPSEIEVPREALEPSVPLMVSLEISLEAAEEEKSRISLIPPEERWAWPEVEAPEAPALPVVPELPEVPMEMPLVLPPELELLSLEAVHRAVALELQANREPDFSSLVSPLSPRRMAARVFYLLLVLSAQQILHVKQEKPYGRLLIQPGPRFH

SEQ ID NO: 292 - protein, 219 aa, Homo sapiens
MAESLRSPRRSLYKLVGSPPWKEAFRQRCLERMRNSRDRLLNRYRQAGSSGPGNSQNSFLVQEVMEEEWNALQSVENCPEDLAQLEELIDMAVLEEIQQELINQEQSIISEYEKSLQFDEKCLSIMLAEWEANPLICPVCTKYNLRITSGVVVCQCGLSIPSHSSELTEQKLRACLEGSINEHSAHCPHTPEFSVTGGTEEKSSLLMSCLACDTWAVIL

SEQ ID NO: 293 - protein, 217 aa, Homo sapiens
MSSKVSRDTLYEAVREVLHGNQRKRRKFLETVELQISLKNYDPQKDKRFSGTVRLKSTPRPKFSVCVLGDQQHCDEAKAVDIPHMDIEALKKLNKNKKLVKKLAKKYDAFLASESLIKQIPRILGPGLNKAGKFPSLLTHNENMVAKVDEVKSTIKFQMKKVLCLAVAVGHVKMTDDELVYNIHLAVNFLVSLLKKNWQNVRALYIKSTMGKPQRLY

SEQ ID NO: 294 - protein, 178 aa, Homo sapiens [sequence omitted]

SEQ ID NO: 295 - protein, 165 aa, Homo sapiens [sequence omitted]

SEQ ID NO: 296 - protein, 204 aa, Homo sapiens [sequence omitted]

SEQ ID NO: 297 - protein, 128 aa, Homo sapiens [sequence omitted]

SEQ ID NO: 298 - protein, 136 aa, Homo sapiens [sequence omitted]

SEQ ID NO: 299 - protein, 115 aa, Homo sapiens [sequence omitted]

SEQ ID NO: 300 - protein, 105 aa, Homo sapiens [sequence omitted]

SEQ ID NO: 301 - protein, 70 aa, Homo sapiens [sequence omitted]

SEQ ID NO: 302 - protein, 257 aa, Homo sapiens [sequence omitted]

SEQ ID NO: 303 - protein, 158 aa, Homo sapiens [sequence omitted]

SEQ ID NO: 304 - protein, 204 aa, Homo sapiens [sequence omitted]

SEQ ID NO: 305 - protein, 194 aa, Homo sapiens [sequence omitted]

SEQ ID NO: 306 - protein, 415 aa, Homo sapiens
MRIPVDPSTSRRFTPPSPAFPCGGGGGKMGENSGALSAQAAVGPGGRARPEVRSMVDVLADHAGELVRTDSPNFLCSVLPSHWRCNKTLPVAFKVVALGDVPDGTVVTVMAGNDENYSAELRNASAVMKNQVARFNDLRFVGRSGRGKSFTLTITVFTNPTQVATYHRAIKVTVDGPREPRRHRQKLEDQTKPFPDRFGDLERLRMRVTPSTPSPRGSLSTTSHFSSQPQTPIQGTSELNPFSDPRQFDRSFPTLPTLTESRFPDPRMHYPGAMSAAFPYSATPSGTSISSLSVAGMPATSRFHHTYLPPPYPGAPQNQSGPFQANPSPYHLYYGTSSGSYQFSMVAGSSSGGDRSPTRMLASCTSSAASVAAGNLMNPSLGGQSDGVEADGSHSNSPTALSTPGRMDEAVWRPY

SEQ ID NO: 307 - protein, 358 aa, Homo sapiens
MPGCELPVGTCPDMCPAAERAQREREHRLHRLEVVPGCRQDPPRADPQRAVKEYSRPAAGKPRPPPSQLRPPSVLLATVRYLAGEVAESADIARAEVASFVADRLRAVLLDLALQGAGDAEAAVVLEAALATLLTVVARLGPDAARGPADPVLLQAQVQEGFGSLRRCYARGAGPHPRQPAFQGLFLLYNLGSVEALHEVLQLPAALRACPPLRKALAVDAAFREGNAARLFRLLQTLPYLPSCAVQCHVGHARREALARFARAFSTPKGQTLPLGFMVNLLALDGLREARDLCQAHGLPLDGEERVVFLRGRYVEEGLPPASTCKVLVESKLRGRTLEEVVMAEEEDEGTDRPGSPA

SEQ ID NO: 308 - protein, 763 aa, Homo sapiens
MDHLNEATQGKEHSEMSNNVSDPKGPPAKIARLEQNGSPLGRGRLGSTGAKMQGVPLKHSGHLMKTNLRKGTMLPVFCVVEHYENAIEYDCKEEHAEFVLVRKDMLFNQLIEMALLSLGYSHSSAAQAKGLIQVGKWNPVPLSYVTDAPDATVADMLQDVYHVVTLKIQLHSCPKLEDLPPEQWSHTTVRNALKDLLKDMNQSSLAKECPLSQSMISSIVNSTYYANVSAAKCQEFGRWYKHFKKTKDMMVEMDSLSELSQQGANHVNFGQQPVPGNTAEQPPSPAQLSHGSQPSVRTPLPNLHPGLVSTPISPQLVNQQLVMAQLLNQQYAVNRLLAQQSLNQQYLNHPPPVSRSMNKPLEQQVSTNTEVSSEIYQWVRDELKRAGISQAVFARVAFNRTQGLLSEILRKEEDPKTASQSLLVNLRAMQNFLQLPEAERDRIYQDERERSLNAASAMGPAPLISTPPSRPPQVKTATIATERNGKPENNTMNINASIYDEIQQEMKRAKVSQALFAKVAATKSQGWLCELLRWKEDPSPENRTLWENLSMIRRFLSLPQPERDAIYEQESNAVHHHGDRPPHIIHVPAEQIQQQQQQQQQQQQQQQAPPPPQPQQQPQTGPRLPPRQPTVASPAESDEENRQKTRPRTKISVEALGILQSFIQDVGLYPDEEAIQTLSAQLDLPKYTIIKFFQNQRYYLKHHGKLKDNSGLEVDVAEYKEEELLKDLEESVQDKNTNTLFSVKLEEELSVEGNTDINTDLKD

SEQ ID NO: 309 - protein, 387 aa, Homo sapiens
MPGHLQEGFGCVVTNRFDQLFDDESDPFEVLKAAENKKKEAGGGGVGGPGAKSAAQAAAQTNSNAAGKQLRKESQKDRKNPLPPSVGVVDKKEETQPPVALKKEGIRRVGRRPDQQLQGEGKIIDRRPERRPPRERRFEKPLEEKGEGGEFSVDRPIIDRPIRGRGGLGRGRGGRGRGMGRGDGFDSRGKREFDRHSGSDRSGLKHEDKRGGSGSHNWGTVKDELTDLDQSNVTEETPEGEEHHPVADTENKENEVEEVKEEGPKEMTLDEWKAIQNKDRAKVEFNIRKPNEGADGQWKKGFVLHKSKSEEAHAEDSVMDHHFRKPANDITSQLEINFGDLGRPGRGGRGGRGGRGRGGRPNRGSRTDKSSASAPDVDDPEAFPALA

SEQ ID NO: 310 - protein, 398 aa, Homo sapiens
MNWHLPLFLLASVTLPSICSHFNPLSLEELGSNTGIQVFNQIVKSRPHDNIVISPHGIASVLGMLQLGADGRTKKQLAMVMRYGVNGVGKILKKINKAIVSKKNKDIVTVANAVFVKNASEIEVPFVTRNKDVFQCEVRNVNFEDPASACDSINAWVKNETRDMIDNLLSPDLIDGVLTRLVLVNAVYFKGLWKSRFQPENTKKRTFVAADGKSYQVPMLAQLSVFRCGSTSAPNDLWYNFIELPYHGESISMLIALPTESSTPLSAIIPHISTKTIDSWMSIMVPKRVQVILPKFTAVAQTDLKEPLKVLGITDMFDSSKANFAKITTGSENLHVSHILQKAKIEVSEDGTKASAATTAILIARSSPPWFIVDRPFLFFIRHNPTGAVLFMGQINKP

SEQ ID NO: 311 - protein, 314 aa, Homo sapiens
MLGKGGKRKFDEHEDGLEGKIVSPCDGPSKVSYTLQRQTIFNISLMKLYNHRPLTEPSLQKTVLINNMLRRIQEELKQEGSLRPMFTPSSQPTTEPSDSYREAPPAFSHLASPSSHPCDLGSTTPLEACLTPASLLEDDDDTFCTSQAMQPTAPTKLSPPALLPEKDSFSSALDEIEELCPTSTSTEAATAATDSVKGTSSEAGTQKLDGPQESRADDSKLMDSLPGNFEITTSTGFLTDLTLDDILFADIDTSMYDFDPCTSSSGTASKMAPVSADDLLKTLAPYSSQPVTPSQPFKMDLTELDHIMEVLVGS

SEQ ID NO: 312 - protein, 335 aa, Homo sapiens
MAGSPTCLTLIYILWQLTGSAASGPVKELVGSVGGAVTFPLKSKVKQVDSIVWTFNTTPLVTIQPEGGTIIVTQNRNRERVDFPDGGYSLKLSKLKKNDSGIYYVGIYSSSLQQPSTQEYVLHVYEHLSKPKVTMGLQSNKNGTCVTNLTCCMEHGEEDVIYTWKALGQAANESHNGSILPISWRWGESDMTFICVARNPVSRNFSSPILARKLCEGAADDPDSSMVLLCLLLVPLLLSLFVLGLFLWFLKRERQEEYIEEKKRVDICRETPNICPHSGENTEYDTIPHTNRTILKEDPANTVYSTVEIPKKMENPHSLLTMPDTPRLFAYENVI

SEQ ID NO: 313 - protein, 635 aa, Homo sapiens
MSVGVSTSAPLSPTSGTSVGMSTFSIMDYVVFVLLLVLSLAIGLYHACRGWGRHTVGELLMADRKMGCLPVALSLLATFQSAVAILGVPSEIYRFGTQYWFLGCCYFLGLLIPAHIFIPVFYRLHLTSAYEYLELRFNKTVRVCGTVTFIFQMVIYMGVVLYAPSLALNAVTGFDLWLSVLALGIVCTVYTALGGLKAVIWTDVFQTLVMFLGQLAVIIVGSAKVGGLGRVWAVASQHGRISGFELDPDPFVRHTFWTLAFGGVFMMLSLYGVNQAQVQRYLSSRTEKAAVLSCYAVFPFQQVSLCVGCLIGLVMFAYYQEYPMSIQQAQAAPDQFVLYFVMDLLKGLPGLPGLFIACLFSGSLSTISSAFNSLATVTMEDLIRPWFPEFSEARAIMLSRGLAFGYGLLCLGMAYISSQMGPVLQAAISIFGMVGGPLLGLFCLGMFFPCANPPGAVVGLLAGLVMAFWIGIGSIVTSMGSSMPPSPSNGSSFSLPTNLTVATVTTLMPLTTFSKPTGLQRFYSLSYLWYSAHNSTTVIVVGLIVSLLTGRMRGRSLNPATIYPVLPKLLSLLPLSCQKRLHCRSYGQDHLDTGLFPEKPRNGVLGDSRDKEAMALDGTAYQGSSSTCILQETSL

SEQ ID NO: 314 - protein, 252 aa, Homo sapiens
MAQLCGLRRSRAFLALLGSLLLSGVLAADRERSIHDFCLVSKVVGRCRASMPRWWYNVTDGSCQLFVYGGCDGNSNNYLTKEECLKKCATVTENATGDLATSRNAADSSVPSAPRRQDSEDHSSDMFNYEEYCTANAVTGPCRASFPRWYFDVERNSCNNFIYGGCRGNKNSYRSEEACMLRCFRQQENPPLPLGSKVVVLAGLFVMVLILFLGASMVYLIRVARRNQERALRTVWSSGDDKEQLVKNTYVL

SEQ ID NO: 315 - protein, 450 aa, Homo sapiens
MVPLVAVVSGPRAQLFACLLRLGTQQVGPLQLHTGASHAARNHYEVLVLGGGSGGITMAARMKRKVGAENVAIVEPSERHFYQPIWTLVGAGAKQLSSSGRPTASVIPSGVEWIKARVTELNPDKNCIHTDDDEKISYRYLIIALGIQLDYEKIKGLPEGFAHPKIGSNYSVKTVEKTWKALQDFKEGNAIFTFPNTPVKCAGAPQKIMYLSEAYFRKTGKRSKANIIFNTSLGAIFGVKKYADALQEIIQERNLTVNYKKNLIEVRADKQEAVFENLDKPGETQVISYEMLHVTPPMSPPDVLKTSPVADAAGWVDVDKETLQHRRYPNVFGIGDCTNLPTSKTAAAVAAQSGILDRTISVIMKNQTPTKKYDGYTSCPLVTGYNRVILAEFDYKAEPLETFPFDQSKERLSMYLMKADLMPFLYWNMMLRGYWGGPAFLRKLFHLGMS

SEQ ID NO: 316 - protein, 1147 aa, Homo sapiens
MDEPPFSEAALEQALGEPCDLDAALLTDIEDMLQLINNQDSDFPGLFDPPYAGSGAGGTDPASPDTSSPGSLSPPPATLSSSLEAFLSGPQAAPSPLSPPQPAPTPLKMYPSMPAFSPGPGIKEESVPLSILQTPTPQPLPGALLPQSFPAPAPPQFSSTPVLGYPSPPGGFSTGSPPGNTQQPLPGLPLASPPGVPPVSLHTQVQSVVPQQLLTVTAAPTAAPVTTTVTSQIQQVPVLLQPHFIKADSLLLTAMKTDGATVKAAGLSPLVSGTTVQTGPLPTLVSGGTILATVPLVVDAEKLPINRLAAGSKAPASAQSRGEKRTAHNAIEKRYRSSINDKIIELKDLVVGTEAKLNKSAVLRKAIDYIRFLQHSNQKLKQENLSLRTAVHKSKSLKDLVSACGSGGNTDVLMEGVKTEVEDTLTPPPSDAGSPFQSSPLSLGSRGSGSGGSGSDSEPDSPVFEDSKAKPEQRPSLHSRGMLDRSRLALCTLVFLCLSCNPLASLLGARGLPSPSDTTSVYHSPGRNVLGTESRDGPGWAQWLLPPVVWLLNGLLVLVSLVLLFVYGEPVTRPHSGPAVYFWRHRKQADLDLARGDFAQAAQQLWLALRALGRPLPTSHLDLACSLLWNLIRHLLQRLWVGRWLAGRAGGLQQDCALRVDASASARDAALVYHKLHQLHTMGKHTGGHLTATNLALSALNLAECAGDAVSVATLAEIYVAAALRVKTSLPRALHFLTRFFLSSARQACLAQSGSVPPAMQWLCHPVGHRFFVDGDWSVLSTPWESLYSLAGNPVDPLAQVTQLFREHLLERALNCVTQPNPSPGSADGDKEFSDALGYLQLLNSCSDAAGAPAYSFSISSSMATTTGVDPVAKWWASLTAVVIHWLRRDEEAAERLCPLVEHLPRVLQESERPLPRAALHSFKAARALLGCAKAESGPASLTICEKASGYLQDSLATTPASSSIDKAVQLFLCDLLLVVRTSLWRQQQPPAPAPAAQGTSSRPQASALELRGFQRDLSSLRRLAQSFRPAMRRVFLHEATARLMAGASPTRTHQLLDRSLRRRAGPGGKGGAVAELEPRPTRREHAEALLLASCYLPPGFLSAPGQRVGMLAEAARTLEKLGDRRLLHDCQQMLMRLGGGTTVTSS

SEQ ID NO: 317 - protein, 302 aa, Homo sapiens
MEPGPDGPAASGPAAIREGWFRETCSLWPGQALSLQVEQLLHHRRSRYQDILVFRSKTYGNVLVLDGVIQCTERDEFSYQEMIANLPLCSHPNPRKVLIIGGGDGGVLREVVKHPSVESVVQCEIDEDVIQVSKKFLPGMAIGYSSSKLTLHVGDGFEFMKQNQDAFDVIITDSSDPMGPAESLFKESYYQLMKTALKEDGVLCCQGECQWLHLDLIKEMRQFCQSLFPVVAYAYCTIPTYPSGQIGFMLCSKNPSTNFQEPVQPLTQQQVAQMQLKYYNSDVHRAAFVLPEFARKALNDVS

SEQ ID NO: 318 - protein, 1788 aa, Homo sapiens
MKRKERIARRLEGIENDTQPILLQSCTGLVTHRLLEEDTPRYMRASDPASPHIGRSNEEEETSDSSLEKQTRSKYCTETSGVHGDSPYGSGTMDTHSLESKAERIARYKAERRRQLAEKYGLTLDPEADSEYLSRYTKSRKEPDAVEKRGGKSDKQEESSRDASSLYPGTETMGLRTCAGESKDYALHVGDGSSDPEVLLNIENQRRGQELSATRQAHDLSPAAESSSTFSFSGRDSSFTEVPRSPKHAHSSSLQQAASRSPSFGDPQLSPEARPRCTSHSETPTVDDEEKVDERAKLSVAAKRLLFREMEKSFDEQNVPKRRSRNTAVEQRLRRLQDRSLTQPITTEEVVIAATLQASAHQKALAKDQTNEGKELAEQGEPDSSTLSLAEKLALFNKLSQPVSKAISTRNRIDTRQRRMNARYQTQPVTLGEVEQVQSGKLIPFSPAVNTSVSTVASTVAPMYAGDLRTKPPLDHNASATDYKFSSSIENSDSPVRSILKSQAWQPLVEGSENKGMLREYGETESKRALTGRDSGMEKYGSFEEAEASYPILNRAREGDSHKESKYAVPRRGSLERANPPITHLGDEPKEFSMAKMNAQGNLDLRDRLPFEEKVEVENVMKRKFSLRAAEFGEPTSEQTGTAAGKTIAQTTAPVSWKPQDSSEQPQEKLCKNPCAMFAAGEIKTPTGEGLLDSPSKTMSIKERLALLKKSGEEDWRNRLSRRQEGGKAPASSLHTQEAGRSLIKKRVTESRESQMTIEERKQLITVREEAWKTRGRGAANDSTQFTVAGRMVKKGLASPTAITPVASPICGKTRGTTPVSKPLEDIEARPDMQLESDLKLDRLETFLRRLNNKVGGMHETVLTVTGKSVKEVMKPDDDETFAKFYRSVDYNMPRSPVEMDEDFDVIFDPYAPKLTSSVAEHKRAVRPKRRVQASKNPLKMLAAREDLLQEYTEQRLNVAFMESKRMKVEKMSSNSNFSEVTLAGLASKENFSNVSLRSVNLTEQNSNNSAVPYKRLMLLQIKGRRHVQTRLVEPRASALNSGDCFLLLSPHCCFLWVGEFANVIEKAKASELATLIQTKRELGCRATYIQTIEEGINTHTHAAKDFWKLLGGQTSYQSAGDPKEDELYEAAIIETNCIYRLMDDKLVPDDDYWGKIPKCSLLQPKEVLVFDFGSEVYVWHGKEVTLAQRKIAFQLAKHLWNGTFDYENCDINPLDPGECNPLIPRKGQGRPDWAIFGRLTEHNETILFKEKFLDWTELKRSNEKNPGELAQHKEDPRTDVKAYDVTRMVSMPQTTAGTILDGVNVGRGYGLVEGHDRRQFEITSVSVDVWHILEFDYSRLPKQSIGQFHEGDAYVVKWKFMVSTAVGSRQKGEHSVRAAGKEKCVYFFWQGRHSTVSEKGTSALMTVELDEERGAQVQVLQGKEPPCFLQCFQGGMVVHSGRREEEEENVQSEWRLYCVRGEVPVEGNLLEVACHCSSLRSRTSMVVLNVNKALIYLWHGCKAQAHTKEVGRTAANKIKEQCPLEAGLHSSSKVTIHECDEGSEPLGFWDALGRRDRKAYDCMLQDPGSFNFAPRLFILSSSSGDFAATEFVYPARAPSVVSSMPFLQEDLYSAPQPALFLVDNHHEVYLWQGWWPIENKITGSARIRWASDRKSAMETVLQYCKGKNLKKPAPKSYLIHAGLEPLTFTNMFPSWEHREDIAEITEMDTEVSNQITLVEDVLAKLCKTIYPLADLLARPLPEGVDPLKLEIYLTDEDFEFALDMTRDEYNALPAWKQVNLKKAKGLF

SEQ ID NO: 319 - protein, 6885 aa, Homo sapiens
MASSPELPTEDEQGSWGIDDLHISLQAEQEDTQKKAFTCWINSQLARHTSPSVISDLFTDIKKGHVLLDLLEVLSGQQLPRDKGSNTFQCRINIEHALTFLRNRSIKLINIHVTDIIDGNPSIILGLIWTIILHFHIEKLAQTLSCNYNQPSLDDVSVVDSSPASSPPAKKCSKVQARWQMSARKALLLWAQEQCATYESVNVTDFKSSWRNGMAFLAIIHALRPDLIDMKSVKHRSNKDNLREAFRIAEQELKIPRLLEPEDVDVVDPDEKSIMTYVAQFLQYSKDAPGTGEEAQGKVKDAMGWLTLQKEKLQKLLKDSENDTYFKKYNSLLSFMESFNEEKKSFLDVLSIKRDLDELDKDHLQLREAWDGLDHQINAWKIKLNYALPPPLHQTEAWLQEVEELMDEDLSASQDHSQAVTLIQEKMTLFKSLMDRFEHHSNILLTFENKDENHLPLVPPNKLEEMKRRINNILEKKFILLLEFHYYKCLVLGLVDEVKSKLDIWNIKYGSRESVELLLEDWHKFIEEKEFLARLDTSFQKCGEIYKNLAGECQNINKQYMMVKSDVCMYRKNIYNVKSTLQKVLACWATYVENLRLLRACFEETKKEEIKEVPFETLAQWNLEHATLNEAGNFLVEVSNDVVGSSISKELRRLNKRWRKLVSKTQLEMNLPLMIKKQDQPTFDNSGNILSKEEKATVEFSTDMSVELPENYNQNIKAGEKHEKENEEFTGQLKVAKDVEKLIGQVEIWEAEAKSVLDQDDVDTSMEESLKHLIAKGSMFDELMARSEDMLQMDIQNISSQESFQHVLTTGLQAKIQEAKEKVQINVVKLIAALKNLTDVSPDLDIRLKMEESQKELESYMMRAQQLLGQRESPGELISKHKEALIISNTKSLAKYLKAVEELKNNVTEDIKMSLEEKSRDVCAKWESLHHELSLYVQQLKIDIEKGKLSDNILKLEKQINKEKKLIRRGRTKGLIKEHEACFSEEGCLYQLNHHMEVLRELCEELPSQKSQQEVKRLLKDYEQKIERLLKCASEIHMTLQPTAGGTSKNEGTITTSENRGGDPHSEAPFAKSDNQPSTEKAMEPTMKFSLASVLRPLQEESIMEKDYSASINSLLERYDTYRDILEHHLQNNKFRITSDFSSEEDRSSSCLQAKLTDLQVIKNETDARWKEFEIISLKLENHVNDIKKPFVIKERDTLKERERELQMTLNTRMESLETALRLVLPVEKASLLLCGSDLPLHKMAIQGFHLIDADRIYQHLRNIQDSIAKQIEICNRLEEPGNFVLKELHPFDLHAMQNIILKYKTQFEGMNHRVQRSEDTLKALEDFLASLRTAKLSAEPVTDLSASDTQVAQENTLTVKNKEGEIHLMKDKAKHLDKCLKMLDMSFKDAERGDDTSCENLLDAFSIKLSETHGYGVQEEFTEENKLLEACIFKNNELLKNIQDVQSQISKIGLKDPTVPAVKHRKKSLIRLDKVLDEYEEEKRHLQEMANSLPHFKDGREKTVNQQCQNTVVLWENTKALVTECLEQCGRVLELLKQYQNFKSILTTLIQKEESVISLQASYMGKENLKKRIAEIEIVKEEFNEHLEVVDKINQVCKNLQFYLNKMKTFEEPPFEKEANIIVDRWLDINEKTEDYYENLGRALALWDKLFNLKNVIDEWTEKALQKMELHQLTEEDRERLKEELQVHEQKTSEFSRRVAEIQFLLQSSEIPLELQVMESSILNKMEHVQKCLTGESNCHALSGSTAELREDLDQAKTQIGMTESLLKALSPSDSLEIFTKLEEIQQQILQQKHSMILLENQIGCLTPELSELKKQYESVSDLFNTKKSVLQDHFSKLLNDQCKNFNDWFSNIKVNLKECFESSETKKSVEQKLQKLSDFLTLEGRNSKIKQVDSVLKHVKKHLPKAHVKELISWLVGQEFELEKMESICQARAKELEDSLQQLLRLQDDHRNLRKWLTNQEEKWKGMEEPGEKTELFCQALARKREQFESVAQLNNSLKEYGFTEEEEIIMEATCLMDRYQTLLRQLSEIEEEDKLLPTEDQSFNDLAHDVIHWIKEIKESLMVLNSSEGKMPLEERIQKIKEIILLKPEGDARIETIMKQAESSEAPLVQKTLTDISNQWDNTLHLASTYLSHQEKLLLEGEKYLQSKEDLRLMLIELKKKQEAGFALQHGLQEKKAQLKIYKKFLKKAQDLTSLLKELKSQGNYLLECTKNPSFSEEPWLEIKHLHESLLQQLQDSVQNLDGHVREHDSYQVCVTDLNTTLDNFSKEFVSFSDKPVDQIAVEEKLQKLQELENRLSLQDGTLKKILALAKSVKQNTSSVGQKIIKDDIKSLQCKQKDLENRLASAKQEMECCLNSILKSKRSTEKKGKFTLPGREKQATSDVQESTQESAAVEKLEEDWEINKDSAVEMAMSKQLSLNAQESMKNTEDERKVNELQNQPLELDTMLRNEQLEEIEKLYTQLEAKKAAIKPLEQTECLNKTETGALVLHNIGYSAQHLDNLLQALITLKKNKESQYCVLRDFQEYLAAVESSMKALLTDKESLKVGPLDSVTYLDKIKKFIASIEKEKDSLGNLKIKWENLSNHVTDMDKKLLESQIKQLEHGWEQVEQQIQKKYSQQVVEYDEFTTLMNKVQDTEISLQQQQQHLQLRLKSPEERAGNQSMIALTTDLQATKHGFSVLKGQAELQMKRIWGEKEKKNLEDGINNLKKQWETLEPLHLEAENQIKKCDIRNKMKETILWAKNLLGELNPSIPLLPDDILSQIRKCKVTHDGILARQQSVESLAEEVKDKVPSLTTYEGSDLNNTLEDLRNQYQMLVLKSTQRSQQLEFKLEERSNFFAIIRKFQLMVQESETLIIPRVETAATEAELKHHHVTLEASQKELQEIDSGISTHLQELTNIYEELNVFERLFLEDQLKNLKIRTNRIQRFIQNTCNEVEHKIKFCRQFHEKTSALQEEADSIQRNELLLNQEVNKGVKEEIYNLKDRLTAIKCCILQVLKLKKVFDYIGLNWDFSQLDQLQTQVFEKEKELEEKIKQLDTFEEEHGKYQALLSKMRAIDLQIKKMTEVVLKAPDSSPESRRLNAQILSQRIEKAKCLCDEIIKKLNENKTFDDSFKEKEILQIKLNAEENDKLYKVLQNMVLELSPKELDEKNCQDKLETSLHVLNQIKSQLQQPLLINLEIKHIQNEKDNCEAFQEQVWAEMCSIKAVTAIEKQREENSSEASDVETKLREFEDLQMQLNTSIDLRTNVLNDAYENLTRYKEAVTRAVESITSLEAIIIPYRVDVGNPEESLEMPLRKQEELESTVAHIQDLTEKLGMISSPEAKLQLQYTLQELVSKNSAMKEAFKAQETEAERYLENYKCYRKMEEDIYTNLSKMETVLGQSMSSLPLSYREALERLEQSKALVSNLISTKEELMKLRQILRLLRLRCTENDGICLLKIVSALWEKWLSLLEAAKEWEMWCEELKQEWKFVSEEIEREAIILDNLQEELPEISKTKEAATTEELSELLDCLCQYGENVEKQQLLLTLLLQRIRSIQNVPESSGAVETVPAFQEITSMKERCNKLLQKVQKNKELVQTEIQERHSFTKEIIALKNFFQQTTTSFQNMAFQDHPEKSEQFEELQSILKKGKLTFENIMEKLRIKYSEMYTIVPAEIESQVEECRKALEDIDEKISNEVLKSSPSYAMRRKIEEINNGLHNVEKMLQQKSKNIEKAQEIQKKMWDELDLWHSKLNELDSEVQDIVEQDPGQAQEWMDNLMIPFQQYQQVSQRAECRTSQLNKATVKMEEYSDLLKSTEAWIENTSHLLANPADYDSLRTLSHHASTVQMALEDSEQKHNLLHSIFMDLEDLSIIFETDELTQSIQELSNQVTALQQKIMESLPQIQRMADDVVAIESEVKSMEKRVSKIKTILLSKEIFDFSPEEHLKHGEVILENIRPMKKTIAEIVSYQVELRLPQTGMKPLPVFQRTNQLLQDIKLLENVTQEQNELLKVVIKQTNEWDEEIENLKQILNNYSAQFSLEHMSPDQADKLPQLQGEIERMEKQILSLNQRKEDLLVDLKATVLNLHQHLKQEQEGVERDRLPAVTSEEGGVAERDASERKLNRRGSMSYLAAVEEEVEESSVKSDNGDEKAEPSPQSWSSLWKHDKDMEEDRASSSSGTIVQEAYGKISTSDNSMAQILTPDSLNTEQGPECSLRPNQTEEGTTPPIEADTLDSSDAQGGLEPRVEKTRPEPTEVLHACKTQVAELELWLQQANVAVEPETLNADMQQVLEQQLVGCQAMLTEIEHKVAFLLETCKDQGLGDNGATQHEAEALSLKLKTVKCNLEKVQMMLQEKHSEDQHPTILKKSSEPEHQEALQPVNLSELESIVTERPQFSRQKDFQQQQVLELKPMEQKDFIKFIEFNAKKMWPQYCQHDNDTTQESSASNQASSPENDVPDSILSPQGQNGDKWQYLHHELSSKIKLPLPQLVEPQVSTNMGILPSVTMYNFRYPTTEELKTYTTQLEDLRQEASNLQTQENMTEEAYINLDKKLFELFLTLSQCLSSVEEMLEMPRLYREDGSGQQVHYETLALELKKLYLALSDKKGDLLKAMTWPGENTNLLLECFDNLQVCLEHTQAAAVCRSKSLKAGLDYNRSYQNEIKRLYHQLIKSKTSLQQSLNEISGQSVAEQLQKADAYTVELENAESRVAKLRDEGERLHLPYALLQEVYKLEDVLDSMWGMLRARYTELSSPFVTESQQDALLQGMVELVKIGKEKLAHGHLKQTKSKVALQAQIENHKVFFQKLVADMLLIQAYSAKILPSLLQNRETFWAEQVTEVKILEEKSRQCGMKLQSLLQKWEEFDENYASLEKDLEILISTLPSVSLVEETEERLVERISFYQQIKRNIGGKHARLYQTLNEGKQLVASVSCPELEGQIAKLEEQWLSLNKKIDHELHRLQALLKHLLSYNRDSDQLTKWLESSQHTLNYWKEQSLNVSQDLDTIRSNINNFFEFSKEVDEKSSLKTAVISIGNQLLHLKETDTATLRASLAQFEQKWTMLITQLPDIQEKLHQLQMEKLPSRKAITEMISWMNNVEHQTSDEDSVHSPSSASQVKHLLQKHKEFRMEMDYKQWIVDFVNQSLLQLSTCDVESKRYERTEFAEHLGEMNRQWHRVHGMLNRKIQHLEQLLESITESENKIQILNNWLEAQEERLKTLQKPESVISVQKLLLDCQDIENQLAIKSKALDELKQSYLTLESGAVPLLEDTASRIDELFQKRSSVLTQVNQLKTSMQSVLQEWKIYDQLYDEVNMMTIRFWYCMEHSKPVVLSLETLRCQVENLQSLQDEAESSEGSWEKLQEVIGKLKGLCPSVAEIIEEKCQNTHKRWTQVNQAIADQLQKAQSLLQLWKAYSNAHGEAAARLKQQEAKFQQLANISMSGNNLAEILPPALQDIKELQHDVQKTKEAFLQNSSVLDRLPQPAESSTHMLLPGPLHSLQRAAYLEKMLLVKANEFEFVLSQFKDFGVRLESLKGLIMHEEENLDRLHQQEKENPDSFLNHVLALTAQSPDIEHLNEVSLKLPLSDVAVKTLQNMNRQWIRATATALERCSELQGIGLNEKFLYCCEKWIQLLEKIEEALKVDVANSLPELLEQQKTYKMLEAEVSINQTIADSYVTQSLQLLDTTEIENRPEFITEFSKLTDRWQNAVQGVRQRKGDVDGLVRQWQDFTTSVENLFRFLTDTSHLLSAVKGQERFSLYQTRSLIHELKNKEIHFQRRRTTCALTLEAGEKLLLTTDLKTKESVGRRISQLQDSWKDMEPQLAEMIKQFQSTVETWDQCEKKIKELKSRLQVLKAQSEDPLPELHEDLHNEKELIKELEQSLASWTQNLKELQTMKADLTRHVLVEDVMVLKEQIEHLHRQWEDLCLRVAIRKQEIEDRLNTWVVFNEKNKELCAWLVQMENKVLQTADISIEEMIEKLQKDCMEEINLFSENKLQLKQMGDQLIKASNKSRAAEIDDKLNKINDRWQHLFDVIGSRVKKLKETFAFIQQLDKNMSNLRTWLARIESELSKPVVYDVCDDQEIQKRLAEQQDLQRDIEQHSAGVESVFNICDVLLHDSDACANETECDSIQQTTRSLDRRWRNICAMSMERRMKIEETWRLWQKFLDDYSRFEDWLKSAERTAACPNSSEVLYTSAKEELKRFEAFQRQIHERLTQLELINKQYRRLARENRTDTASRLKQMVHEGNQRWDNLQRRVTAVLRRLRHFTNQREEFEGTRESILVWLTEMDLQLTNVEHFSESDADDKMRQLNGFQQEITLNTNKIDQLIVFGEQLIQKSEPLDAVLIEDELEELHRYCQEVFGRVSRFHRRLTSCTPGLEDEKEASENETDMEDPREIQTDSWRKRGESEEPSSPQSLCHLVAPGHERSGCETPVSVDSIPLEWDHTGDVGGSSSHEEDEEGPYYSALSGKSISDGHSWHVPDSPSCPEHHYKQMEGDRNVPPVPPASSTPYKPPYGKLLLPPGTDGGKEGPRVLNGNPQQEDGGLAGITEQQSGAFDRWEMIQAQELHNKLKIKQNLQQLNSDISAITTWLKKTEAELEMLKMAKPPSDIQEIELRVKRLQEILKAFDTYKALVVSVNVSSKEFLQTESPESTELQSRLRQLSLLWEAAQGAVDSWRGGLRQSLMQCQDFHQLSQNLLLWLASAKNRRQKAHVTDPKADPRALLECRRELMQLEKELVERQPQVDMLQEISNSLLIKGHGEDCIEAEEKVHVIEKKLKQLREQVSQDLMALQGTQNPASPLPSFDEVDSGDQPPATSVPAPRAKQFRAVRTTEGEEETESRVPGSTRPQRSFLSRVVRAALPLQLLLLLLLLLACLLPSSEEDYSCTQANNFARSFYPMLRYTNGPPPT

SEQ ID NO: 320 - protein, 259 aa, Homo sapiens
MAPNIYLVRQRISRLGQRMSGFQINLNPLKEPLGFIKVLEWIASIFAFATCGGFKGQTEIQVNCPPAVTENKTVTATFGYPFRLNEASFQPPPGVNICDVNWKDYVLIGDYSSSAQFYVTFAVFVFLYCIAALLLYVGYTSLYLDSRKLPMIDFVVTLVATFLWLVSTSAWAKALTDIKIATGHNIIDELPPCKKKAVLCYFGSVTSMGSLNVSVIFGFLNMILWGGNAWFVYKETSLHSPSNTSAPHSQGGIPPPTGI

SEQ ID NO: 321 - protein, 431 aa, Homo sapiens
MAEITNIRPSFDVSPVVAGLIGASVLVVCVSVTVFVWSCCHQQAEKKQKNPPYKFIHMLKGISIYPETLSNKKKIIKVRRDKDGPGREGGRRNLLVDAAEAGLLSRDKDPRGPSSGSCIDQLPIKMDYGEELRSPITSLTPGESKTTSPSSPEEDVMLGSLTFSVDYNFPKKALVVTIQEAHGLPVMDDQTQGSDPYIKMTILPDKRHRVKTRVLRKTLDPVFDETFTFYGIPYSQLQDLVLHFLVLSFDRFSRDDVIGEVMVPLAGVDPSTGKVQLTRDIIKRNIQKCISRGELQVSLSYQPVAQRMTVVVLKARHLPKMDITGLSGNPYVKVNVYYGRKRIAKKKTHVKKCTLNPIFNESFIYDIPTDLLPDISIEFLVIDFDRTTKNEVVGRLILGAHSVTASGAEHWREVCESPRKPVAKWHSLSEY

SEQ ID NO: 322 - protein, 425 aa, Homo sapiens
MDKNIGEQLNKAYEAFRQACMDRDSAVKELQQKTENYEQRIREQQEQLSLQQTIIDKLKSQLLLVNSTQDNNYGCVPLLEDSETRKNNLTLDQPQDKVISGIAREKLPKVRRQEVSSPRKETSARSLGSPLLHERGNIEKTFWDLKEEFHKICMLAKAQKDHLSKLNIPDTATETQCSVPIQCTDKTDKQEALFKPQAKDDINRGAPSITSVTPRGLCRDEEDTSFESLSKFNVKFPPMDNDSTFLHSTPERPGILSPATSEAVCQEKFNMEFRDNPGNFVKTEETLFEIQGIDPIASAIQNLKTTDKTKPSNLVNTCIRTTLDRAACLPPGDHNALYVNSFPLLDPSDAPFPSLDSPGKAIRGPQQPIWKPFPNQDSDSVVLSGTDSELHIPRVCEFCQAVFPPSITSRGDFLRHLNSHFNGET

SEQ ID NO: 323 - protein, 808 aa, Homo sapiens
MAELLASAGSACSWDFPRAPPSFPPPAASRGGLGGTRSFRPHRGAESPRPGRDRDGVRVPMASSRCPAPRGCRCLPGASLAWLGTVLLLLADWVLLRTALPRIFSLLVPTALPLLRVWAVGLSRWAVLWLGACGVLRATVGSKSENAGAQGWLAALKPLAAALGLALPGLALFRELISWGAPGSADSTRLLHWGSHPTAFVVSYAAALPAAALWHKLGSLWVPGGQGGSGNPVRRLLGCLGSETRRLSLFLVLVVLSSLGEMAIPFFTGRLTDWILQDGSADTFTRNLTLMSILTIASAVLEFVGDGIYNNTMGHVHSHLQGEVFGAVLRQETEFFQQNQTGNIMSRVTEDTSTLSDSLSENLSLFLWYLVRGLCLLGIMLWGSVSLTMVTLITLPLLFLLPKKVGKWYQLLEVQVRESLAKSSQVAIEALSAMPTVRSFANEEGEAQKFREKLQEIKTLNQKEAVAYAVNSWTTSISGMLLKVGILYIGGQLVTSGAVSSGNLVTFVLYQMQFTQAVEVLLSIYPRVQKAVGSSEKIFEYLDRTPRCPPSGLLTPLHLEGLVQFQDVSFAYPNRPDVLVLQGLTFTLRPGEVTALVGPNGSGKSTVAALLQNLYQPTGGQLLLDGKPLPQYEHRYLHRQVAAVGQEPQVFGRSLQENIAYGLTQKPTMEEITAAAVKSGAHSFISGLPQGYDTEVDEAGSQLSGGQRQAVALARALIRKPCVLILDDATSALDANSQLQVEQLLYESPERYSRSVLLITQHLSLVEQADHILFLEGGAIREGGTHQQLMEKKGCYWAMVQAPADAPE

SEQ ID NO: 324 - protein, 1298 aa, Homo sapiens
MEPPSCIQDEPFPHPLEPEPGVSAQPGPGKPSDKRFRLWYVGGSCLDHRTTLPMLPWLMAEIRRRSQKPEAGGCGAPAAREVILVLSAPFLRCVPAPGAGASGGTSPSATQPNPAVFIFEHKAQHISRFIHNSHDLTYFAYLIKAQPDDPESQMACHVFRATDPSQVPDVISSIRQLSKAAMKEDAKPSKDNEDAFYNSQKFEVLYCGKVTVTHKKAPSSLIDDCMEKFSLHEQQRLKIQGEQRGPDPGEDLADLEVVVPGSPGDCLPEEADGTDTHLGLPAGASQPALTSSRVCFPERILEDSGFDEQQEFRSRCSSVTGVQRRVHEGSQKSQPRRRHASAPSHVQPSDSEKNRTMLFQVGRFEINLISPDTKSVVLEKNFKDISSCSQGIKHVDHFGFICRESPEPGLSQYICYVFQCASESLVDEVMLTLKQAFSTAAALQSAKTQIKLCEACPMHSLHKLCERIEGLYPPRAKLVIQRHLSSLTDNEQADIFERVQKMKPVSDQEENELVILHLRQLCEAKQKTHVHIGEGPSTISNSTIPENATSSGRFKLDILKNKAKRSLTSSLENIFSRGANRMRGRLGSVDSFERSNSLASEKDYSPGDSPPGTPPASPPSSAWQTFPEEDSDSPQFRRRAHTFSHPPSSTKRKLNLQDGRAQGVRSPLLRQSSSEQCSNLSSVRRMYKESNSSSSLPSLHTSFSAPSFTAPSFLKSFYQNSGRLSPQYENEIRQDTASESSDGEGRKRTSSTCSNESLSVGGTSVTPRRISWRQRIFLRVASPMNKSPSAMQQQDGLDRNELLPLSPLSPTMEEEPLVVFLSGEDDPEKIEERKKSKELRSLWRKAIHQQILLLRMEKENQKLEASRDELQSRKVKLDYEEVGACQKEVLITWDKKLLNCRAKIRCDMEDIHTLLKEGVPKSRRGEIWQFLALQYRLRHRLPNKQQPPDISYKELLKQLTAQQHAILVDLGRTFPTHPYFSVQLGPGQLSLFNLLKAYSLLDKEVGYCQGISFVAGVLLLHMSEEQAFEMLKFLMYDLGFRKQYRPDMMSLQIQMYQLSRLLHDYHRDLYNHLEENEISPSLYAAPWFLTLFASQFSLGFVARVFDIIFLQGTEVIFKVALSLLSSQETLIMECESFENIVEFLKNTLPDMNTSEMEKIITQVFEMDISKQLHAYEVEYHVLQDELQESSYSCEDSETLEKLERANSQLKRQNMDLLEKLQVAHTKIQALESNLENLLTRETKMKSLIRTLEQEKMAYQKTVEQLRKLLPADALVNCDLLLRDLNCNPNNKAKIGNKP

SEQ ID NO: 325 - protein, 729 aa, Homo sapiens
MQSTSNHLWLLSDILGQGATANVFRGRHKKTGDLFAIKVFNNISFLRPVDVQMREFEVLKKLNHKNIVKLFAIEEETTTRHKVLIMEFCPCGSLYTVLEEPSNAYGLPESEFLIVLRDVVGGMNHLRENGIVHRDIKPGNIMRVIGEDGQSVYKLTDFGAARELEDDEQFVSLYGTEEYLHPDMYERAVLRKDHQKKYGATVDLWSIGVTFYHAATGSLPFRPFEGPRRNKEVMYKIITGKPSGAISGVQKAENGPIDWSGDMPVSCSLSRGLQVLLTPVLANILEADQEKCWGFDQFFAETSDILHRMVIHVFSLQQMTAHKIYIHSYNTATIFHELVYKQTKIISSNQELIYEGRRLVLEPGRLAQHFPKTTEENPIFVVSREPLNTIGLIYEKISLPKVHPRYDLDGDASMAKAITGVVCYACRIASTLLLYQELMRKGIRWLIELIKDDYNETVHKKTEVVITLDFCIRNIEKTVKVYEKLMKINLEAAELGEISDIHTKLLRLSSSQGTIETSLQDIDSRLSPGGSLADAWAHQEGTHPKDRNVEKLQVLLNCMTEIYYQFKKDKAERRLAYNEEQIHKFDKQKLYYHATKAMTHFTDECVKKYEAFLNKSEEWIRKMLHLRKQLLSLTNQCFDIEEEVSKYQEYTNELQETLPQKMFTASSGIKHTMTPIYPSSNTLVEMTLGMKKLKEEMEGVVKELAENNHILERFGSLTMDGGLRNVDCL

SEQ ID NO: 326 - protein, 667 aa, Homo sapiens
MHHQQRMAALGTDKELSDLLDFSAMFSPPVSSGKNGPTSLASGHFTGSNVEDRSSSGSWGNGGHPSPSRNYGDGTPYDHMTSRDLGSHDNLSPPFVNSRIQSKTERGSYSSYGRESNLQGCHQQSLLGGDMDMGNPGTLSPTKPGSQYYQYSSNNPRRRPLHSSAMEVQTKKVRKVPPGLPSSVYAPSASTADYNRDSPGYPSSKPATSTFPSSFFMQDGHHSSDPWSSSSGMNQPGYAGMLGNSSHIPQSSSYCSLHPHERLSYPSHSSADINSSLPPMSTFHRSGTNHYSTSSCTPPANGTDSIMANRGSGAAGSSQTGDALGKALASIYSPDHTNNSFSSNPSTPVGSPPSLSAGTAVWSRNGGQASSSPNYEGPLHSLQSRIEDRLERLDDAIHVLRNHAVGPSTAMPGGHGDMHGIIGPSHNGAMGGLGSGYGTGLLSANRHSLMVGTHREDGVALRGSHSLLPNQVPVPQLPVQSATSPDLNPPQDPYRGMPPGLQGQSVSSGSSEIKSDDEGDENLQDTKSSEDKKLDDDKKDIKSITSNNDDEDLTPEQKAEREKERRMANNARERLRVRDINEAFKELGRMVQLHLKSDKPQTKLLILHQAVAVILSLEQQVRERNLNPKAACLKRREEEKVSSEPPPLSLAGPHPGMGDASNHMGQM

SEQ ID NO: 327 - protein, 114 aa, Homo sapiens
MAECPTLGEAVTDHPDRLWAWEKFVYLDEKQHAWLPLTIEIKDRLQLRVLLRREDVVLGRPMTPTQIGPSLLPIMWQLYPDGRYRSSDSSFWRLVYHIKIDGVEDMLLELLPDD

SEQ ID NO: 328 - protein, 1098 aa, Homo sapiens
MLEGDLVSKMLRAVLQSHKNGVALPRLQGEYRSLTGDWIPFKQLGFPTLEAYLRSVPAVVRIETSRSGEITCYAMACTETARIAQLVARQRSSKRKTGRQVNCQMRVKKTMPFFLEGKPKATLRQPGFASNFSVGKKPNPAPLRDKGNSVGVKPDAEMSPYMLHTTLGNEAFKDIPVQRHVTMSTNNRFSPKASLQPPLQMHLSRTSTKEMSDNLNQTVEKPNVKPPASYTYKMDEVQNRIKEILNKHNNGIWISKLPHFYKELYKEDLNQGILQQFEHWPHICTVEKPCSGGQDLLLYPAKRKQLLRSELDTEKVPLSPLPGPKQTPPLKGCPTVMAGDFKEKVADLLVKYTSGLWASALPKAFEEMYKVKFPEDALKNLASLSDVCSIDYISGNPQKAILYAKLPLPTDKIQKDAGQAHGDNDIKAMVEQEYLQVEESIAESANTFMEDITVPPLMIPTEASPSVLVVELSNTNEVVIRYVGKDYSAAQELMEDEMKEYYSKNPKITPVQAVNVGQLLAVNAEEDAWLRAQVISTEENKIKVCYVDYGFSENVEKSKAYKLNPKFCSLSFQATKCKLAGLEVLSDDPDLVKVVESLTCGKIFAVEILDKADIPLVVLYDTSGEDDININATCLKAICDKSLEVHLQVDAMYTNVKVTNICSDGTLYCQVPCKGLNKLSDLLRKIEDYFHCKHMTSECFVSLPFCGKICLFHCKGKWLRVEITNVHSSRALDVQFLDSGTVTSVKVSELREIPPRFLQEMIAIPPQAIKCCLADLPQSIGMWTPDAVLWLRDSVLNCSDCSIKVTKVDETRGIAHVYLFTPKNFPDPHRSINRQITNADLWKHQKDVFLSAISSGADSPNSKNGNMPMSGNTGENFRKNLTDVIKKSMVDHTSAFSTEELPPPVHLSKPGEHMDVYVPVACHPGYFVIQPWQEIHKLEVLMEEMILYYSVSEERHIAVEKDQVYAAKVENKWHRVLLKGILTNGLVSVYELDYGKHELVNIRKVQPLVDMFRKLPFQAVTAQLAGVKCNQWSEEASMVFRNHVEKKPLVALVQTVIENANPWDRKVVVYLVDTSLPDTDTWIHDFMSEYLIELSKVN

SEQ ID NO: 329 - protein, 851 aa, Homo sapiens
MTSHYVIAIFALMSSCLATAGPEPGALCELSPVSASHPVQALMESFTVLSGCASRGTTGLPQEVHVLNLRTAGQGPGQLQREVTLHLNPISSVHIHHKSVVFLLNSPHPLVWHLKTERLATGVSRLFLVSEGSVVQFSSANFSLTAETEERNFPHGNEHLLNWARKEYGAVTSFTELKIARNIYIKVGEDQVFPPKCNIGKNFLSLNYLAEYLQPKAAEGCVMSSQPQNEEVHIIELITPNSNPYSAFQVDITIDIRPSQEDLEVVKNLILILKCKKSVNWVIKSFDVKGSLKIIAPNSIGFGKESERSMTMTKSIRDDIPSTQGNLVKWALDNGYSPITSYTMAPVANRFHLRLENNAEEMGDEEVHTIPPELRILLDPGALPALQNPPIRGGEGQNGGLPFPFPDISRRVWNEEGEDGLPRPKDPVIPSIQLFPGLREPEEVQGSVDIALSVKCDNEKMIVAVEKDSFQASGYSGMDVTLLDPTCKAKMNGTHFVLESPLNGCGTRPRWSALDGVVYYNSIVIQVPALGDSSGWPDGYEDLESGDNGFPGDMDEGDASLFTRPEIVVFNCSLQQVRNPSSFQEQPHGNITFNMELYNTDLFLVPSQGVFSVPENGHVYVEVSVTKAEQELGFAIQTCFISPYSNPDRMSHYTIIENICPKDESVKFYSPKRVHFPIPQADMDKKRFSFVFKPVFNTSLLFLQCELTLCTKMEKHPQKLPKCVPPDEACTSLDASIIWAMMQNKKTFTKPLAVIHHEAESKEKGPSMKEPNPISPPIFHGLDTLTVMGIAFAAFVIGALLTGALWYIYSHTGETAGRQQVPTSPPASENSSAAHSIGSTQSTPCSSSSTA

SEQ ID NO: 330 - protein, 805 aa, Homo sapiens
MAQPLAFILDVPETPGDQGQGPSPYDESEVHDSFQQLIQEQSQCTAQEGLELQQREREVTGSSQQTLWRPEGTQSTATLRILASMPSRTIGRSRGAIISQYYNRTVQLRCRSSRPLLGNFVRSAWPSLRLYDLELDPTALEEEEKQSLLVKELQSLAVAQRDHMLRGMPLSLAEKRSLREKSRTPRGKWRGQPGSGGVCSCCGRLRYACVLALHSLGLALLSALQALMPWRYALKRIGGQFGSSVLSYFLFLKTLLAFNALLLLLLVAFIMGPQVAFPPALPGPAPVCTGLELLTGAGCFTHTVMYYGHYSNATLNQPCGSPLDGSQCTPRVGGLPYNMPLAYLSTVGVSFFITCITLVYSMAHSFGESYRVGSTSGIHAITVFCSWDYKVTQKRASRLQQDNIRTRLKELLAEWQLRHSPRSVCGRLRQAAVLGLVWLLCLGTALGCAVAVHVFSEFMIQSPEAAGQEAVLLVLPLVVGLLNLGAPYLCRVLAALEPHDSPVLEVYVAICRNLILKLAILGTLCYHWLGRRVGVLQGQCWEDFVGQELYRFLVMDFVLMLLDTLFGELVWRIISEKKLKRRRKPEFDIARNVLELIYGQTLTWLGVLFSPLLPAVQIIKLLLVFYVKKTSLLANCQAPRRPWLASHMSTVFLTLLCFPAFLGAAVFLCYAVWQVKPSSTCGPFRTLDTMYEAGRVWVRHLEAAGPRVSWLPWVHRYLMENTFFVFLVSALLLAVIYLNIQVVRGQRKVICLLKEQISNEGEDKIFLINKLHSIYERKEREERSRVGTTEEAAAPPALLTDEQDA

SEQ ID NO: 331 - protein, 195 aa, Homo sapiens
MSAARPQFSIDDAFELSLEDGGPGPESSGVARFGPLHFERRARFEVADEDKQSRLRYQNLENDEDGAQASPEPDGGVGTRDSSRTSIRSSQWSFSTISSSTQRSYNTCCSWTQHPLIQKNRRVVLASFLLLLLGLVLILVGVGLEATPSPGVSSAIFFVPGFLLLVPGVYHVIFIYCAVKGHRGFQFFYLPYFEK

SEQ ID NO: 332 - protein, 492 aa, Homo sapiens
MGGRRGPNRTSYCRNPLCEPGSSGGSSGSHTSSASVTSVRSRTRSSSGTGLSSPPLATQTVVPLQHCKIPELPVQASILFELQLFFCQLIALFVHYINIYKTVWWYPPSHPPSHTSLNFHLIDFNLLMVTTIVLGRRFIGSIVKEASQRGKVSLFRSILLFLTRFTVLTATGWSLCRSLIHLFRTYSFLNLLFLCYPFGMYIPFLQLNCDLRKTSLFNHMASMGPREAVSGLAKSRDYLLTLRETWKQHTRQLYGPDAMPTHACCLSPSLIRSEVEFLKMDFNWRMKEVLVSSMLSAYYVAFVPVWFVKNTHYYDKRWSCELFLLVSISTSVILMQHLLPASYCDLLHKAAAHLGCWQKVDPALCSNVLQHPWTEECMWPQGVLVKHSKNVYKAVGHYNVAIPSDVSHFRFHFFFSKPLRILNILLLLEGAVIVYQLYSLMSSEKWHQTISLALILFSNYYAFFKLLRDRLVLGKAYSYSASPQRDLDHRFS

SEQ ID NO: 333 - protein, 301 aa, Homo sapiens
MELSDVTLIEGVGNEVMVVAGVVVLILALVLAWLSTYVADSGSNQLLGAIVSAGDTSVLHLGHVDHLVAGQGNPEPTELPHPSEGNDEKAEEAGEGRGDSTGEAGAGGGVEPSLEHLLDIQGLPKRQAGAGSSSPEAPLRSEDSTCLPPSPGLITVRLKFLNDTEELAVARPEDTVGALKSKYFPGQESQMKLIYQGRLLQDPARTLRSLNITDNCVIHCHRSPPGSAVPGPSASLAPSATEPPSLGVNVGSLMVPVFVVLLGVVWYFRINYRQFFTAPATVSLVGVTVFFSFLVFGMYGR

SEQ ID NO: 334 - protein, 1621 aa, Homo sapiens
MAKSGGCGAGAGVGGGNGALTWVNNAAKKEESETANKNDSSKKLSVERVYQKKTQLEHILLRPDTYIGSVEPLTQFMWVYDEDVGMNCREVTFVPGLYKIFDEILVNAADNKQRDKNMTCIKVSIDPESNIISIWNNGKGIPVVEHKVEKVYVPALIFGQLLTSSNYDDDEKKVTGGRNGYGAKLCNIFSTKFTVETACKEYKHSFKQTWMNNMMKTSEAKIKHFDGEDYTCITFQPDLSKFKMEKLDKDIVALMTRRAYDLAGSCRGVKVMFNGKKLPVNGFRSYVDLYVKDKLDETGVALKVIHELANERWDVCLTLSEKGFQQISFVNSIATTKGGRHVDYVVDQVVGKLIEVVKKKNKAGVSVKPFQVKNHIWVFINCLIENPTFDSQTKENMTLQPKSFGSKCQLSEKFFKAASNCGIVESILNWVKFKAQTQLNKKCSSVKYSKIKGIPKLDDANDAGGKHSLECTLILTEGDSAKSLAVSGLGVIGRDRYGVFPLRGKILNVREASHKQIMENAEINNIIKIVGLQYKKSYDDAESLKTLRYGKIMIMTDQDQDGSHIKGLLINFIHHNWPSLLKHGFLEEFITPIVKASKNKQELSFYSIPEFDEWKKHIENQKAWKIKYYKGLGTSTAKEAKEYFADMERHRILFRYAGPEDDAAITLAFSKKKIDDRKEWLTNFMEDRRQRRLHGLPEQFLYGTATKHLTYNDFINKELILFSNSDNERSIPSLVDGFKPGQRKVLFTCFKRNDKREVKVAQLAGSVAEMSAYHHGEQALMMTIVNLAQNFVGSNNINLLQPIGQFGTRLHGGKDAASPRYIFTMLSTLARLLFPAVDDNLLKFLYDDNQRVEPEWYIPIIPMVLINGAEGIGTGWACKLPNYDAREIVNNVRRMLDGLDPHPMLPNYKNFKGTIQELGQNQYAVSGEIFVVDRNTVEITELPVRTWTQVYKEQVLEPMLNGTDKTPALISDYKEYHTDTTVKFVVKMTEEKLAQAEAAGLHKVFKLQTTLTCNSMVLFDHMGCLKKYETVQDILKEFFDLRLSYYGLRKEWLVGMLGAESTKLNNQARFILEKIQGKITIENRSKKDLIQMLVQRGYESDPVKAWKEAQEKAAEEDETQNQHDDSSSDSGTPSGPDFNYILNMSLWSLTKEKVEELIKQRDAKGREVNDLKRKSPSDLWKEDLAAFVEELDKVESQEREDVLAGMSGKAIKGKVGKPKVKKLQLEETMPSPYGRRIIPEITAMKADASKKLLKKKKGDLDTAAVKVEFDEEFSGAPVEGAGEEALTPSVPINKGPKPKREKKEPGTRVRKTPTSSGKPSAKKVKKRNPWSDDESKSESDLEETEPVVIPRDSLLRRAAAERPKYTFDFSEEEDDDADDDDDDNNDLEELKVKASPITNDGEDEFVPSDGLDKDEYTFSPGKSKATPEKSLHDKKSQDFGNLFSFPSYSQKSEDDSAKFDSNEEDSASVFSPSFGLKQTDKVPSKTVAAKKGKPSSDTVPKPKRAPKQKKVVEAVNSDSDSEFGIPKKTTTPKGKGRGAKKRKASGSENEGDYNPGRKTSKTTSKKPKKTSFDQDSDVDIFPSDFPTEPPSLPRTGRARKEVKYFAESDEEEDDVDFAMFN

SEQ ID NO: 335 - protein, 243 aa, Homo sapiens [sequence omitted]

SEQ ID NO: 336 - protein, 377 aa, Homo sapiens
MRLSVRRVLLAAGCALVLVLAVQLGQQVLECRAVLAGLRSPRGAMRPEQEELVMVGTNHVEYRYGKAMPLIFVGGVPRSGTTLMRAMLDAHPEVRCGEETRIIPRVLAMRQAWSKSGREKLRLDEAGVTDEVLDAAMQAFILEVIAKHGEPARVLCNKDPFTLKSSVYLSRLFPNSKFLLMVRDGRASVHSMITRKVTIAGFDLSSYRDCLTKWNKAIEVMYAQCMEVGKEKCLPVYYEQLVLHPRRSLKLILDFLGIAWSDAVLHHEDLIGKPGGVSLSKIERSTDQVIKPVNLEALSKWTGHIPGDVVRDMAQIAPMLAQLGYDPYANPPNYGNPDPFVINNTQRVLKGDYKTPANLKGYFQVNQNSTSSHLGSS

SEQ ID NO: 337 - protein, 551 aa, Homo sapiens
MISPDPRPSPGLARWAESYEAKCERRQEIRESRRCRPNVTTCRQVGKTLRIQQREQLQRARLQQFFRRRNLELEEKGKAQHPQAREQGPSRRPGQVTVLKEPLSCARRISSPREQVTGTSSEVFPAQHPPPSGICRDLSDHLSSQAGGLPPQDTPIKKPPKHHRGTQTKAEGPTIKNDASQQTNYGVAVLDKEIIQLSDYLKEALQRELVLKQKMVILQDLLSTLIQASDSSWKGQLNEDKLKGKLRSLENQLYTCTQKYSPWGMKKVLLEMEDQKNSYEQKAKESLQKVLEEKMNAEQQLQSTQRSLALAEQKCEEWRSQYEALKEDWRTLGTQHRELESQLHVLQSKLQGADSRDLQMNQALRFLENEHQQLQAKIECLQGDRDLCSLDTQDLQDQLKRSEAEKLTLVTRVQQLQGLLQNQSLQLQEQEKLLTKKDQALPVWSPKSFPNEVEPEGTGKEKDWDLRDQLQKKTLQLQAKEKECRELHSELDNLSDEYLSCLRKLQHCREELNQSQQLPPRRQCGRWLPVLMVVIAAALAVFLANKDNLMI

SEQ ID NO: 338 - protein, 105 aa, Homo sapiens
MVKQIESKTAFQEALDAAGDKLVVVDFSATWCGPCKMIKPFFHSLSEKYSNVIFLEVDVDDCQDVASECEVKCMPTFQFFKKGQKVGEFSGANKEKLEATINELV

SEQ ID NO: 339 - protein, 147 aa, Homo sapiens
MALKRIHKELNDLARDPPAQCSAGPVGDDMFHWQATIMGPNDSPYQGGVFFLTIHFPTDYPFKPPKVAFTTRIYHPNINSNGSICLDILRSQWSPALTISKVLLSICSLLCDPNPDDPLVPEIARIYKTDREKYNRIAREWTQKYAM

SEQ ID NO: 340 - protein, 153 aa, Homo sapiens
MMASMRVVKELEDLQKKPPPYLRNLSSDDANVLVWHALLLPDQPPYHLKAFNLRISFPPEYPFKPPMIKFTTKIYHPNVDENGQICLPIISSENWKPCTKTCQVLEALNVLVNRPNIREPLRMDLADLLTQNPELFRKNAEEFTLRFGVDRPS

SEQ ID NO: 341 - protein, 1755 aa, Homo sapiens
MASELEPEVQAIDRSLLECSAEEIAGKWLQATDLTREVYQHLAHYVPKIYCRGPNPFPQKEDMLAQHVLLGPMEWYLCGEDPAFGFPKLEQANKPSHLCGRVFKVGEPTYSCRDCAVDPTCVLCMECFLGSIHRDHRYRMTTSGGGGFCDCGDTEAWKEGPYCQKHELNTSEIEEEEDPLVHLSEDVIARTYNIFAITFRYAVEILTWEKESELPADLEMVEKSDTYYCMLFNDEVHTYEQVIYTLQKAVNCTQKEAIGFATTVDRDGRRSVRYGDFQYCEQAKSVIVRNTSRQTKPLKVQVMHSSIVAHQNFGLKLLSWLGSIIGYSDGLRRILCQVGLQEGPDGENSSLVDRLMLSDSKLWKGARSVYHQLFMSSLLMDLKYKKLFAVRFAKNYQQLQRDFMEDDHERAVSVTALSVQFFTAPTLARMLITEENLMSIIIKTFMDHLRHRDAQGRFQFERYTALQAFKFRRVQSLILDLKYVLISKPTEWSDELRQKFLEGFDAFLELLKCMQGMDPITRQVGQHIEMEPEWEAAFTLQMKLTHVISMMQDWCASDEKVLIEAYKKCLAVLMQCHGGYTDGEQPITLSICGHSVETIRYCVSQEKVSIHLPVSRLLAGLHVLLSKSEVAYKFPELLPLSELSPPMLIEHPLRCLVLCAQVHAGMWRRNGFSLVNQIYYYHNVKCRREMFDKDVVMLQTGVSMMDPNHFLMIMLSRFELYQIFSTPDYGKRFSSEITHKDVVQQNNTLIEEMLYLIIMLVGERFSPGVGQVNATDEIKREIIHQLSIKPMAHSELVKSLPEDENKETGMESVIEAVAHFKKPGLTGRGMYELKPECAKEFNLYFYHFSRAEQSKAEEAQRKLKRQNREDTALPPPVLPPFCPLFASLVNILQSDVMLCIMGTILQWAVEHNGYAWSESMLQRVLHLIGMALQEEKQHLENVTEEHVVTFTFTQKISKPGEAPKNSPSILAMLETLQNAPYLEVHKDMIRWILKTFNAVKKMRESSPTSPVAETEGTIMEESSRDKDKAERKRKAEIARLRREKIMAQMSEMQRHFIDENKELFQQTLELDASTSAVLDHSPVASDMTLTALGPAQTQVPEQRQFVTCILCQEEQEVKVESRAMVLAAFVQRSTVLSKNRSKFIQDPEKYDPLFMHPDLSCGTHTSSCGHIMHAHCWQRYFDSVQAKEQRRQQRLRLHTSYDVENGEFLCPLCECLSNTVIPLLLPPRNIFNNRLNFSDQPNLTQWIRTISQQIKALQFLRKEESTPNNASTKNSENVDELQLPEGFRPDFRPKIPYSESIKEMLTTFGTATYKVGLKVHPNEEDPRVPIMCWGSCAYTIQSIERILSDEDKPLFGPLPCRLDDCLRSLTRFAAAHWTVASVSVVQGHFCKLFASLVPNDSHEELPCILDIDMFHLLVGLVLAFPALQCQDFSGISLGTGDLHIFHLVTMAHIIQILLTSCTEENGMDQENPPCEEESAVLALYKTLHQYTGSALKEIPSGWHLWRSVRAGIMPFLKCSALFFHYLNGVPSPPDIQVPGTSHFEHLCSYLSLPNNLICLFQENSEIMNSLIESWCRNSEVKRYLEGERDAIRYPRESNKLINLPEDYSSLINQASNFSCPKSGGDKSRAPTLCLVCGSLLCSQSYCCQTELEGEDVGACTAHTYSCGSGVGIFLRVRECQVLFLAGKTKGCFYSPPYLDDYGETDQGLRRGNPLHLCKERFKKIQKLWHQHSVTEEIGHAQEANQTLVGIDWQHL

SEQ ID NO: 342 - protein, 365 aa, Homo sapiens
MPGGKKVAGGGSSGATPTSAAATAPSGVRRLETSEGTSAQRDEEPEEEGEEDLRDGGVPFFVNRGGLPVDEATWERMWKHVAKIHPDGEKVAQRIRGATDLPKIPIPSVPTFQPSTPVPERLEAVQRYIRELQYNHTGTQFFEIKKSRPLTGLMDLAKEMTKEALPIKCLEAVILGIYLTNSMPTLERFPISFKTYFSGNYFRHIVLGVNFAGRYGALGMSRREDLMYKPPAFRTLSELVLDFEAAYGRCWHVLKKVKLGQSVSHDPHSVEQIEWKHSVLDVERLGRDDFRKELERHARDMRLKIGKGTGPPSPTKDRKKDVSSPQRAQSSPHRRNSRSERRPSGDKKTSEPKAMPDLNGYQIRV

SEQ ID NO: 343 - protein, 123 aa, Homo sapiens
MACRCLSFLLMGTFLSVSQTVLAQLDALLVFPGQVAQLSCTLSPQHVTIRDYGVSWYQQRAGSAPRYLLYYRSEEDHHRPADIPDRFSAAKDEAHNACVLTISPVQPEDDADYYCSVGYGFSP

SEQ ID NO: 344 - protein, 796 aa, Homo sapiens
MPTTQQSPQDEQEKLLDEAIQAVKVQSFQMKRCLDKNKLMDALKHASNMLGELRTSMLSPKSYYELYMAISDELHYLEVYLTDEFAKGRKVADLYELVQYAGNIIPRLYLLITVGVVYVKSFPQSRKDILKDLVEMCRGVQHPLRGLFLRNYLLQCTRNILPDEGEPTDEETTGDISDSMDFVLLNFAEMNKLWVRMQHQGHSRDREKRERERQELRILVGTNLVRLSQLEGVNVERYKQIVLTGILEQVVNCRDALAQEYLMECIIQVFPDEFHLQTLNPFLRACAELHQNVNVKNIIIALIDRLALFAHREDGPGIPADIKLFDIFSQQVATVIQSRQDMPSEDVVSLQVSLINLAMKCYPDRVDYVDKVLETTVEIFNKLNLEHIATSSAVSKELTRLLKIPVDTYNNILTVLKLKHFHPLFEYFDYESRKSMSCYVLSNVLDYNTEIVSQDQVDSIMNLVSTLIQDQPDQPVEDPDPEDFADEQSLVGRFIHLLRSEDPDQQYLILNTARKHFGAGGNQRIRFTLPPLVFAAYQLAFRYKENSKVDDKWEKKCQKIFSFAHQTISALIKAELAELPLRLFLQGALAAGEIGFENHETVAYEFMSQAFSLYEDEISDSKAQLAAITLIIGTFERMKCFSEENHEPLRTQCALAASKLLKKPDQGRAVSTCAHLFWSGRNTDKNGEELHGGKRVMECLKKALKIANQCMDPSLQVQLFIEILNRYIYFYEKENDAVTIQVLNQLIQKIREDLPNLESSEETEQINKHFHNTLEHLRLRRESPESEGPIYEGLIL

SEQ ID NO: 345 - protein, 305 aa, Homo sapiens
MTNQYGILFKQEQAHDDAIWSVAWGTNKKENSETVVTGSLDDLVKVWKWRDERLDLQWSLEGHQLGVVSVDISHTLPIAASSSLDAHIRLWDLENGKQIKSIDAGPVDAWTLAFSPDSQYLATGTHVGKVNIFGVESGKKEYSLDTRGKFILSIAYSPDGKYLASGAIDGIINIFDIATGKLLHTLEGHAMPIRSLTFSPDSQLLVTASDDGYIKIYDVQHANLAGTLSGHASWVLNVAFCPDDTHFVSSSSDKSVKVWDVGTRTCVHTFFDHQDQVWGVKYNGNGSKIVSVGDDQEIHIYDCPI

SEQ ID NO: 346 - protein, 940 aa, Homo sapiens
MARKRAAGGEPRGRELRSQKSKAKSKARREEEEEDAFEDEKPPKKSLLSKVSQGKRKRGCSHPGGSADGPAKKKVAKVTVKSENLKVIKDEALSDGDDLRDFPSDLKKAHHLKRGATMNEDSNEEEEESENDWEEVEELSEPVLGDVRESTAFSRSLLPVKPVEIEIETPEQAKTRERSEKIKLEFETYLRRAMKRFNKGVHEDTHKVHLLCLLANGFYRNNICSQPDLHAIGLSIIPARFTRVLPRDVDTYYLSNLVKWFIGTFTVNAELSASEQDNLQTTLERRFAIYSARDDEELVHIFLLILRALQLLTRLVLSLQPIPLKSATAKGKKPSKERLTADPGGSSETSSQVLENHTKPKTSKGTKQEETFAKGTCRPSAKGKRNKGGRKKRSKPSSSEEDEGPGDKQEKATQRRPHGRERRVASRVSYKEESGSDEAGSGSDFELSSGEASDPSDEDSEPGPPKQRKAPAPQRTKAGSKSASRTHRGSHRKDPSLPAASSSSSSSKRGKKMCSDGEKAEKRSIAGIDQWLEVFCEQEEKWVCVDCVHGVVGQPLTCYKYATKPMTYVVGIDSDGWVRDVTQRYDPVWMTVTRKCRVDAEWWAETLRPYQSPFMDREKKEDLEFQAKHMDQPLPTAIGLYKNHPLYALKRHLLKYEAIYPETAAILGYCRGEAVYSRDCVHTLHSRDTWLKKARVVRLGEVPYKMVKGFSNRARKARLAEPQLREENDLGLFGYWQTEEYQPPVAVDGKVPRNEFGNVYLFLPSMMPIGCVQLNLPNLHRVARKLDIDCVQAITGFDFHGGYSHPVTDGYIVCEEFKDVLLTAWENEQAVIERKEKEKKEKRALGNWKLLAKGLLIRERLKRRYGPKSEAAAPHTDAGGGLSSDEEEGTSSQAEAARILAASWPQNREDEEKQKLKGGPKKTKREKKAAASHLFPFEQL

SEQ ID NO: 347 - protein, 429 aa, Homo sapiens
MAQAPADPGREGHLEQRILQVLTEAGSPVKLAQLVKECQAPKRELNQVLYRMKKELKVSLTSPATWCLGGTDPEGEGPAELALSSPAERPQQHAATIPETPGPQFSQQREEDIYRFLKDNGPQRALVIAQALGMRTAKDVNRDLYRMKSRHLLDMDEQSKAWTIYRPEDSGRRAKSASIIYQHNPINMICQNGPNSWISIANSEAIQIGHGNIITRQTVSREDGSAGPRHLPSMAPGDSSTWGTLVDPWGPQDIHMEQSILRRVQLGHSNEMRLHGVPSEGPAHIPPGSPPVSATAAGPEASFEARIPSPGTHPEGEAAQRIHMKSCFLEDATIGNSNKMSISPGVAGPGGVAGSGEGEPGEDAGRRPADTQSRSHFPRDIGQPITPSHSKLTPKLETMTLGNRSHKAAEGSHYVDEASHEGSWWGGGI

SEQ ID NO: 348 - protein, 779 aa, Homo sapiens
MASFVTEVLAHSGRLEKEDLGTRISRLTRRVEEIKGEVCNMISKKYSEFLPSMQSAQGLITQVDKLSEDIDLLKSRIESEVRRDLHVSTGEFTDLKQQLERDSVVLSLLKQLQEFSTAIEEYNCALTEKKYVTGAQRLEEAQKCLKLLKSRKCFDLKILKSLSMELTIQKQNILYHLGEEWQKLIVWKFPPSKDTSSLESYLQTELHLYTEQSHKEEKTPMPPISSVLLAFSVLGELHSKLKSFGQMLLKYILRPLASCPSLHAVIESQPNIVIIRFESIMTNLEYPSPSEVFTKIRLVLEVLQKQLLDLPLDTDLENEKTSTVPLAEMLGDMIWEDLSECLIKNCLVYSIPTNSSKLQQYEEIIQSTEEFENALKEMRFLKGDTTDLLKYARNINSHFANKKCQDVIVAARNLMTSEIHNTVKIIPDSKINVPELPTPDEDNKLEVQKVSNTQYHEVMNLEPENTLDQHSFSLPTCRISESVKKLMELAYQTLLEATTSSDQCAVQLFYSVRNIFHLFHDVVPTYHKENLQKLPQLAAIHHNNCMYIAHHLLTLGHQFRLRLAPILCDGTATFVDLVPGFRRLGTECFLAQMRAQKGELLERLSSARNFSNMDDEENYSAASKAVRQVLHQLKRLGIVWQDVLPVNIYCKAMGTLLNTAISEVIGKITALEDISTEDGDRLYSLCKTVMDEGPQVFAPLSEESKNKKYQEEVPVYVPKWMPFKELMMMLQASLQEIGDRWADGKGPLAAAFSSSEVKALIRALFQNTERRAAALAKIK

What is claimed is:

1. A method for determining an indicator used in assessing a likelihood of a subject having a presence, absence or degree of herpesvirus-associated systemic inflammatory response syndrome (HVaSIRS), the method comprising, consisting or consisting essentially of: (1) determining biomarker values that are measured or derived for at least two (e.g., 2, 3, 4, 5, 6, 7, 8, 9, 10, or more) corresponding HVaSIRS biomarkers in a sample taken from the subject and that are at least partially indicative of respective levels of the HVaSIRS biomarkers in the sample; and (2) determining the indicator using the biomarker values.

2. A method according to claim 1, wherein the subject has at least one clinical sign of SIRS.

3. A method according to claim 1 or claim 2, wherein the at least two HVaSIRS biomarkers are not biomarkers of at least one other SIRS condition (e.g., 1, 2, 3, 4 or 5 other SIRS conditions) selected from the group consisting of: bacterium associated SIRS (BaSIRS), autoimmune disease associated SIRS (ADaSIRS), cancer associated SIRS (CaSIRS), trauma associated SIRS and a non-HVaSIRS virus associated SIRS (nHVVaSIRS).

4. A method according to any one of claims 1 to 3, wherein the sample is a biological sample, representative examples of which include blood samples including peripheral blood samples, and leukocyte samples.

5. A method according to any one of claims 1 to 3, wherein the at least two HVaSIRS biomarkers are expression products of genes selected from the group consisting of: ACAT1, ACSL1, ADCY3, ADCY7, ADRB2, ADSL, AKAP11, ALDOC, ARHGEF18, ARNTL, ARSB, ATP2B4, BACH2, BCL11A, BNIP3, BTG1, BTG3, C1QB, C6orf48, CAMK1D, CASP4, CASZ1, CCL5, CCR7, CD300A, CD37, CD79A, CD79B, CD8A, CD93, CHST12, COL17A1, COX4I1, CRY2, CST7, CYB561, CYLD, DGKA, DHRS3, DNPEP, DPEP2, EEF1G, EHD1, EIF2AK2, EIF2S3, EIF4B, EPHX2, ETS1, FAM129A, FDFT1, FLNB, FLT3LG, GALNT10, GDPD5, GFI1, GNG7, GPR162, GPR56, GRWD1, GZMA, HERC5, HERC6, HIC2, HSD17B8, ICAM2, IFI16, IFI44, IFITM1, IKBKG, IL4R, ITM2C, ITPKB, KIF13B, KPNB1, LAMA5, LBH, LDLR, LDLRAP1, LEF1, LRMP, LSM7, LTBP3, MAL, MED25, MLLT11, MRPS18B, MZF1, NAALADL1, NACA, NAP1L1, NECAP2, NET1, NGFRAP1, NKG7, NOSIP, OASL, PABPC4, PARP3, PEX11B, PFKL, PFKP, PHB2, PIK3IP1, PLEKHB1, POP5, PPP2R2B, PRDM1, PRKD2, PTOV1, PXN, RAB3GAP1, RABGAP1L, RALA, RARRES3, RBM17, RBM4B, REC8, RPAIN, RPL1OA, RPL11, RPL12, RPL15, RPL22, RPL27, RPL30, RPL36, RPL38, RPL8, RPS11, RPS5, RPS9, RUNX3, SAC3D1, SATB1, SERBP1, SERPINE2, SERTAD2, SLAMF7, SLC5A6, SPINT2, SQRDL, SREBF1, SRM, SVIL, SYNE2, SYPL1, SYT11, TANK, TAP1, TBC1D4, TBK1, TCF4, TCL1A, TDRD7, TGFBR3, TMC6, TMEM134, TMEM39B, TMUB2, TOP2B, TPK1, TPST2, TRAF3IP3, TXN, UBE2D2, UBE2L6, UBR2, VASH1, VPREB3, VPS35, WDR61, XPC, ZBP1 and ZW10. Non-limiting examples of nucleotide sequences for these HVaSIRS biomarkers are listed in SEQ ID NOs: 1-174

6. A method according to claim 5, wherein an individual HVaSIRS biomarker is selected from the group consisting of: (a) a polynucleotide expression product comprising a nucleotide sequence that shares at least 70% (or at least 71% to at least 99% and all integer percentages in between) sequence identity with the sequence set forth in any one of SEQ ID NO: 1-174, or a complement thereof; (b) a polynucleotide expression product comprising a nucleotide sequence that encodes a polypeptide comprising the amino acid sequence set forth in any one of SEQ ID NO: 175-348; (c) a polynucleotide expression product comprising a nucleotide sequence that encodes a polypeptide that shares at least 70% (or at least 71% to at least 99% and all integer percentages in between) sequence similarity or identity with at least a portion of the sequence set forth in SEQ ID NO: 175-348; (d) a polynucleotide expression product comprising a nucleotide sequence that hybridizes to the sequence of (a), (b), (c) or a complement thereof, under medium or high stringency conditions; (e) a polypeptide expression product comprising the amino acid sequence set forth in any one of SEQ ID NO: 175-348; and (f) a polypeptide expression product comprising an amino acid sequence that shares at least 70% (or at least 71% to at least 99% and all integer percentages in between) sequence similarity or identity with the sequence set forth in any one of SEQ ID NO: 175-348.

7. A method according to any one of claims 1 to 6, wherein pairs of biomarkers are used to determine the indicator.

8. A method according to claim 7, wherein one biomarker of a biomarker pair is selected from Group A HVaSIRS biomarkers and the other is selected from Group B HVaSIRS biomarkers, wherein an individual Group A HVaSIRS biomarker is an expression product of a gene selected from the group consisting of: GZMA, TGFBR3, CD8A, PABPC4, CHST12, NKG7, SYT11, RARRES3, RPL12, KIF13B, ICAM2, ADRB2, MRPS18B, RPL8, RPS11, SLAMF7, PRKD2, FDFT1, ATP2B4, RPL38, BTG1, DNPEP, NAP1L1, RABGAP1L and ACAT1 and wherein an individual Group B HVaSIRS biomarker is an expression product of a gene selected from the group consisting of: EPHX2, CCR7, MAL, LEF1, TRAF3IP3, PIK3IP1, ITM2C, LDLRAP1, NOSIP, ARHGEF18, SATB1, ITPKB, TBC1D4, FLT3LG, DHRS3, RBM4B, HSD17B8, MLLT11, TMC6, PLEKHB1, ALDOC, RPL22, EEF1G, TOP2B, BACH2, BNIP3, ADSL, GRWD1, RPL1OA, TMEM134, ETS1, CRY2, SERBP1, RPS5, ZW10, EIF4B, PEX11B, PHB2, SERPINE2, SRM, LSM7, RPL15, RBM17, DGKA, PTOV1, HIC2, NET1, XPC, SLC5A6, SERTAD2, TMEM39B, RPL27, RPL11, C6orf48, WDR61, PFKP, EIF2S3, NECAP2, RPL30, NACA, NGFRAP1, RPS9, RALA, COX4I1, UBE2D2 and VPS35.

9. A method according to claim 8, wherein one biomarker of a biomarker pair is selected from Group C HVaSIRS biomarkers and the other is selected from Group D HVaSIRS biomarkers, wherein an individual Group C HVaSIRS biomarker is an expression product of a gene selected from the group consisting of: RUNX3, GPR56, LBH, POP5, SYNE2, TPST2, RPL36, GALNT10, GFI1, MZF1, SREBF1, AKAP11, CAMK1D, CYB561, BTG3, CST7, SVIL, EIF2AK2, ARNTL, ZBP1, ADCY7, SYPL1 and HERC6, and wherein an individual Group D HVaSIRS biomarker is an expression product of a gene selected from the group consisting of: CD79B, CD79A, VPREB3, TCL1A, LAMA5, BCL11A, TCF4, DPEP2, RPAIN, RAB3GAP1, MED25 and LRMP.

10. A method according to claim 8, wherein one biomarker of a biomarker pair is selected from Group E HVaSIRS biomarkers and the other is selected from Group F HVaSIRS biomarkers, wherein an individual Group E HVaSIRS biomarker is an expression product of a gene selected from the group consisting of: TMUB2, ARSB, C1QB, PFKL, EHD1, PRDM1, IKBKG, TAP1, TANK, PARP3, OASL, ADCY3, FAM129A, SQRDL, UBR2, IFITM1, CYLD, ACSL1, PXN, UBE2L6, IL4R, COL17A1, TXN, CD300A, LDLR, TBK1, HERC5, TDRD7, KPNB1, IFI44, CASP4 and IFI16 and wherein an individual Group F HVaSIRS biomarker is an expression product of a gene selected from the group consisting of: GPR162, NAALADL1, LTBP3, REC8, CD37, TPK1, GDPD5, SAC3D1, SPINT2 and CD93.

11. A method according to claim 8, wherein biomarker values are measured or derived for a Group A HVaSIRS biomarker and for a Group B HVaSIRS biomarker, and the indicator is determined by combining the biomarker values.

12. A method according to claim 9, wherein biomarker values are measured or derived for a Group C HVaSIRS biomarker and for a Group D HVaSIRS biomarker, and the indicator is determined by combining the biomarker values.

13. A method according to claim 10, wherein biomarker values are measured or derived for a Group E HVaSIRS biomarker and for a Group F HVaSIRS biomarker, and the indicator is determined by combining the biomarker values.

14. A method according to any one of claims 7 to 13, wherein biomarker values are measured or derived for a Group A HVaSIRS biomarker, for a Group B HVaSIRS biomarker, for a Group C HVaSIRS biomarker, for a Group D HVaSIRS biomarker, for a Group E HVaSIRS biomarker, and for a Group F HVaSIRS biomarker, and the indicator is determined by combining the biomarker values.

15. A method according to any one of claims 7 to 14, wherein the method comprises combining the biomarker values using a combining function, wherein the combining function is at least one of: additive model; a linear model; a support vector machine; a neural network model; a tree-learning method (e.g., random forest model); a regression model; a genetic algorithm; an annealing algorithm; a weighted sum; a nearest neighbor model; an ensemble method (e.g., bagging, boosting weighted averaging); and a probabilistic model.

16. A method according to any one of claims 7 to 15, wherein the method comprises: (a) determining a pair of biomarker values, each biomarker value being a value measured or derived for at least one corresponding HVaSIRS biomarker; (b) determining a derived biomarker value using the pair of biomarker values, the derived biomarker value being indicative of a ratio of concentrations of the pair of HVaSIRS biomarkers; and determining the indicator using the derived marker value.

17. A method according to claim 16, wherein biomarker values are measured or derived for a Group A HVaSIRS biomarker and for a Group B HVaSIRS biomarker to obtain the pair of biomarker values and the derived biomarker value is determined using the pair of biomarker values.

18. A method according to claim 16, wherein biomarker values are measured or derived for a Group C HVaSIRS biomarker and for a Group D HVaSIRS biomarker to obtain the pair of biomarker values and the derived biomarker value is determined using the pair of biomarker values.

19. A method according to claim 16, wherein biomarker values are measured or derived for a Group E HVaSIRS biomarker and for a Group F HVaSIRS biomarker to obtain the pair of biomarker values and the derived biomarker value is determined using the pair of biomarker values.

20. A method according to any one of claims 7 to 19, wherein the method comprises: (a) determining a first derived biomarker value using a first pair of biomarker values, the first derived biomarker value being indicative of a ratio of concentrations of first and second HVaSIRS biomarkers; (b) determining a second derived biomarker value using a second pair of biomarker values, the second derived biomarker value being indicative of a ratio of concentrations of third and fourth HVaSIRS biomarkers; (c) determining a third derived biomarker value using a third pair of biomarker values, the third derived biomarker value being indicative of a ratio of concentrations of fifth and sixth HVaSIRS biomarkers; and (d) determining the indicator by combining the first, second and third derived biomarker values.

21. A method according to claim 20, wherein the first HVaSIRS biomarker is selected from Group A HVaSIRS biomarkers, the second HVaSIRS biomarker is selected from Group B HVaSIRS biomarkers, the third HVaSIRS biomarker is selected from Group C HVaSIRS biomarkers, the fourth HVaSIRS biomarker is selected from Group D HVaSIRS biomarkers, the fifth HVaSIRS biomarker is selected from Group E HVaSIRS biomarkers and the sixth HVaSIRS biomarker is selected from Group F HVaSIRS biomarkers.

22. A method according to claim 20, wherein the method comprises combining the biomarker values using a combining function, wherein the combining function is at least one of: additive model; a linear model; a support vector machine; a neural network model; a tree-learning method (e.g., random forest model); a regression model; a genetic algorithm; an annealing algorithm; a weighted sum; a nearest neighbor model; an ensemble method (e.g., bagging, boosting weighted averaging); and a probabilistic model.

23. A method according to any one of claims 7 to 22, wherein an individual pair of HVaSIRS biomarkers has a mutual correlation in respect of HVaSIRS that lies within a mutual correlation range, the mutual correlation range being between ±0.9 (or between ±0.8, ±0.7, ±0.6, ±0.5, ±0.4, ±0.3, ±0.2 or ±0.1) and the indicator has a performance value greater than or equal to a performance threshold representing the ability of the indicator to diagnose the presence, absence or degree of HVaSIRS, wherein the performance threshold is indicative of an explained variance of at least 0.3.

24. A method according to claim 23, wherein an individual HVaSIRS biomarker has a condition correlation with the presence, absence or degree of HVaSIRS that lies outside a condition correlation range, wherein the condition correlation range is between ±0.3.

25. A method according to any one of claims 7 to 24, wherein the Group A HVaSIRS biomarker is suitably an expression product of CCL5, the Group B HVaSIRS biomarker is suitably an expression product of FLNB, the Group C HVaSIRS biomarker is suitably an expression product of PPP2R2B, the Group D HVaSIRS biomarker is suitably an expression product of GNG7, the Group E HVaSIRS biomarker is suitably an expression product of CASZ1, and the Group F HVaSIRS biomarker is suitably an expression product of VASH1.

26. A method according to any one of claims 7 to 25, wherein the virus associated with the HVaSIRS is selected from human herpesviruses 1-8 (HHV1-8) (Herpes simplex virus 1 and 2, Varicella Zoster virus, Epstein-Barr virus, Cytomegalovirus, Roseolovirus, Herpes simplex virus 7, and Kaposi's sarcoma-associated virus).

27. An apparatus for determining an indicator used in assessing a likelihood of a subject having a presence, absence or degree of HVaSIRS, the apparatus comprises at least one electronic processing device that:
determines a pair of biomarker values, each biomarker value being a value measured or derived for at least one corresponding HVaSIRS biomarker, as broadly described above and elsewhere herein, of a sample taken from the subject and being at least partially indicative of a concentration of the HVaSIRS biomarker in the sample;
determines a derived biomarker value using the pair of biomarker values, the derived biomarker value being indicative of a ratio of concentrations of the pair of HVaSIRS biomarkers; and
determines the indicator using the derived biomarker value.

28. A composition for determining an indicator used in assessing a likelihood of a subject having a presence, absence or degree of HVaSIRS, the composition comprising, consisting or consisting essentially of at least one pair of cDNAs and at least one oligonucleotide primer or probe that hybridizes to an individual one of the cDNAs, wherein the at least one pair of cDNAs is selected from pairs of cDNA including a first pair and a second pair of cDNAs, wherein the first pair comprises a Group A HVaSIRS biomarker cDNA and a Group B HVaSIRS biomarker cDNA, wherein the second pair comprises a Group C HVaSIRS biomarker cDNA and a Group D HVaSIRS biomarker cDNA, and wherein the third pair comprises a Group E HVaSIRS biomarker cDNA and a Group F HVaSIRS biomarker cDNA.

29. A composition according to claim 28, wherein the composition comprises a population of cDNAs corresponding to mRNA derived from a cell or cell population.

30. A composition according to claim 29, wherein the cell is a cell of the immune system, suitably a leukocyte.

31. A composition according to claim 29 or claim 30, wherein the cell population is blood, suitably peripheral blood.

32. A composition according to any one of claim 28 to 31, wherein the at least one oligonucleotide primer or probe is hybridized to an individual one of the cDNAs.

33. A composition according to any one of claim 28 to 32, wherein the composition further comprises a labeled reagent for detecting the cDNA.

34. A composition according to claim 33, wherein the labeled reagent is a labeled said at least one oligonucleotide primer or probe.

35. A composition according to claim 33, wherein the labeled reagent is a labeled said cDNA.

36. A composition according to any one of claim 28 to 35, wherein the at least one oligonucleotide primer or probe is in a form other than a high density array.

37. A kit for determining an indicator indicative of the likelihood of the presence, absence or degree of HVaSIRS, the kit comprising, consisting or consisting essentially of at least one pair of reagents selected from reagent pairs including a first pair of reagents, a second pair of reagents and a third pair of reagents, wherein the first pair of reagents comprises (i) a reagent that allows quantification of a Group A HVaSIRS biomarker; and (ii) a reagent that allows quantification of a Group B HVaSIRS biomarker, wherein the second pair of reagents comprises: (iii) a reagent that allows quantification of a Group C HVaSIRS biomarker; and (iv) a reagent that allows quantification of a Group D HVaSIRS biomarker wherein the third pair of reagents comprises: (v) a reagent that allows quantification of a Group E HVaSIRS biomarker; and (vi) a reagent that allows quantification of a Group F HVaSIRS biomarker

38. A method for managing a subject with HVaSIRS, the method comprising, consisting or consisting essentially of: exposing the subject to a treatment regimen for treating HVaSIRS, or avoiding exposing the subject to a treatment regimen for treating a SIRS other than HVaSIRS based on an indicator obtained from an indicator-determining method, wherein the indicator is indicative of the presence of HVaSIRS in the subject, and wherein the indicator-determining method is an indicator-determining method as defined in any one of claims 1 to 26.

39. A method according to claim 38, wherein the method further comprises taking a sample from the subject and determining an indicator indicative of the likelihood of the presence, absence or degree of HVaSIRS using the an indicator-determining method.

40. A method according to claim 38, wherein the method further comprises sending a sample taken from the subject to a laboratory at which the indicator is determined according to the indicator-determining method.

41. A method according to claim 40, wherein the method further comprises receiving the indicator from the laboratory.

42. A method of monitoring the efficacy of a particular treatment regimen in a subject towards a desired health state (e.g., absence of HVaSIRS), the method comprising, consisting or consisting essentially of: (1) determining a biomarker value that is measured or derived for at least two (e.g., 2, 3, 4, 5, 6, 7, 8, 9, 10, or more) corresponding HVaSIRS biomarker as defined in any one of claims 1 to 26 in a sample taken from the subject and that is at least partially indicative of a level of the HVaSIRS biomarker in the sample, wherein the sample is taken after treatment of the subject with the treatment regimen; (2) determining an indicator using the biomarker value, wherein the indicator is used in assessing a likelihood of the subject having a presence, absence or degree of HVaSIRS, and (3) assessing the likelihood of the subject having a presence, absence or degree of HVaSIRS using the indicator to thereby determine whether the treatment regimen is effective for changing the health status of the subject to the desired health state.

43. A method of determining whether a treatment regimen is effective for treating a subject with HVaSIRS, the method comprising, consisting or consisting essentially of: (a) correlating a biomarker value that is measured or derived for at least two (e.g., 2, 3, 4, 5, 6, 7, 8, 9, 10, or more) corresponding HVaSIRS biomarker as defined in any one of claim 1 to 26 with an effective treatment regimen; (b) determining a biomarker value that is measured or derived for the at least two corresponding HVaSIRS biomarker in a sample taken from the subject after treatment with the treatment regimen; (c) determining an indicator using the biomarker value, wherein the indicator is used in assessing a likelihood of the subject having a presence, absence or degree of HVaSIRS, (d) assessing the likelihood of the subject having a presence, absence or degree of HVaSIRS using the indicator to thereby determine whether the treatment regimen is effective for treating HVaSIRS in the subject.

44. A method of correlating a biomarker value that is measured or derived for at least two (e.g., 2, 3, 4, 5, 6, 7, 8, 9, 10, or more) corresponding HVaSIRS biomarkers as defined in any one of claim 1 to 26 with a positive or negative response to a treatment regimen, the method comprising, consisting or consisting essentially of: (a) determining a biomarker value for the at least two corresponding HVaSIRS biomarkers in a sample taken from a subject with HVaSIRS following commencement of the treatment regimen, wherein the biomarker value is at least partially indicative of a level of the HVaSIRS biomarkers in the sample; and (c) correlating the sample HVaSIRS biomarker value with a positive or negative response to the treatment regimen.

45. A method of determining a positive or negative response to a treatment regimen by a subject with HVaSIRS, the method comprising, consisting or consisting essentially of: (a) correlating a reference biomarker value that is measured or derived for at least two (e.g., 2, 3, 4, 5, 6, 7, 8, 9, 10, or more) corresponding HVaSIRS biomarkers as defined in any one of claim 1 to 26 with a positive or negative response to the treatment regimen; and (b) determining a biomarker value for the at least two corresponding HVaSIRS biomarkers in a sample taken from a subject with HVaSIRS, wherein the sample biomarker value indicates whether the subject is responding to the treatment regimen.

46. A method according to claim 46, wherein the method further comprises: (i) determining a first sample biomarker value for the at least two corresponding HVaSIRS biomarkers as defined in any one of claim 1 to 26 in a sample taken from the subject prior to commencing the treatment regimen; and (ii) comparing the first sample biomarker value with a second sample biomarker value for the at least two corresponding HVaSIRS biomarkers taken from the subject after commencement of the treatment regimen, to thereby determine a positive or negative response to the treatment regimen.

47. A method of treating, preventing or inhibiting the development of HVaSIRS in a subject, the method comprising, consisting or consisting essentially of: exposing the subject to a treatment regimen for treating HVaSIRS, or avoiding exposing the subject to a treatment regimen for treating a SIRS other than HVaSIRS based on an indicator obtained from an indicator-determining method, the indicator-determining method comprising, consisting or consisting essentially of: (a) determining a plurality of biomarker values, each biomarker value being indicative of a value measured or derived for at least two HVaSIRS biomarkers of the subject, wherein the at least two HVaSIRS biomarkers are as defined in any one of claim 1 to 26; (b) determining an indicator using a combination of the plurality of biomarker values, the indicator being at least partially indicative of the presence, absence or degree of HVaSIRS, wherein: (i) at least two (e.g., 2, 3, 4, 5, 6, 7, 8, 9, 10, or more) HVaSIRS biomarkers have a mutual correlation in respect of HVaSIRS that lies within a mutual correlation range, the mutual correlation range being between ±0.9; and (ii) the indicator has a performance value greater than or equal to a performance threshold representing the ability of the indicator to diagnose the presence, absence or degree of HVaSIRS, the performance threshold being indicative of an explained variance of at least 0.3.

48. A method according to claim 47, wherein the method further comprises: (1) determining a plurality of measured biomarker values, each measured biomarker value being a measured value of HVaSIRS biomarker of the subject; and (2) applying a function to at least one of the measured biomarker values to determine at least one derived biomarker value, the at least one derived biomarker value being indicative of a value of a corresponding derived HVaSIRS biomarker.

49. A method according to claim 48, wherein the function includes at least one of: (a) multiplying two biomarker values; (b) dividing two biomarker values; (c) adding two biomarker values; (d) subtracting two biomarker values; (e) a weighted sum of at least two biomarker values; (f) a log sum of at least two biomarker values; (g) a geometric mean of at least two biomarker values; and (h) a sigmoidal function of at least two biomarker values.

50. A method for monitoring the efficacy of a particular treatment regimen in a subject towards a desired health state, the method comprising, consisting or consisting essentially of: (a) determining an indicator using a combination of the plurality of biomarker values, the indicator being at least partially indicative of the presence, absence or degree of HVaSIRS, wherein: (i) at least two (e.g., 2, 3, 4, 5, 6, 7, 8, 9, 10, or more) HVaSIRS biomarkers as defined in any one of claim 1 to 26 have a mutual correlation in respect of HVaSIRS that lies within a mutual correlation range, the mutual correlation range being between ±0.9; and (ii) the indicator has a performance value greater than or equal to a performance threshold representing the ability of the indicator to diagnose the presence, absence or degree of HVaSIRS, or to provide a prognosis for a HVaSIRS, the performance threshold being indicative of an explained variance of at least 0.3, and (b) determining that the treatment regimen is effective for changing the health status of the subject to the desired health state on the basis that the indicator indicates the presence of HVaSIRS or the presence of HVaSIRS of a lower degree relative to the degree of HVaSIRS in the subject before treatment with the treatment regimen.

51. Use of an indicator-determining method according to any one of claims 1 to 26 in methods for correlating a biomarker profile with an effective treatment regimen for HVaSIRS, or for determining whether a treatment regimen is effective for treating a subject with HVaSIRS, or for correlating a biomarker profile with a positive or negative response to a treatment regimen, or for determining a positive or negative response to a treatment regimen by a subject with HVaSIRS.
